(19) United States
(12) Patent Application Publication
(10) Pub. No.: US 2023/0357436 A1
(43) Pub. Date: Nov. 9, 2023

(54) ANTI-IDIOTYPE COMPOSITIONS AND METHODS OF USE THEREOF

(71) Applicant: Exuma Biotech Corp., West Palm Beach, FL (US)

(72) Inventors: Gregory Ian FROST, West Palm Beach, FL (US); Gregory Harold SCHREIBER, Palm Beach Gardens, FL (US); Anirban KUNDU, George Town, Grand Cayman, KY (US)

(73) Assignee: Exuma Biotech Corp., West Palm Beach, FL (US)

(21) Appl. No.: 18/043,465

(22) PCT Filed: Aug. 31, 2021
(86) PCT No.: PCT/US2021/048532

§ 371 Date: Feb. 28, 2023

Related U.S. Application Data
Application No. PCT/US2021/048532 is a continuation-in-part of application No. PCT/US2021/020922, filed on Mar. 4, 2021.
Application No. PCT/US2021/048532 is a continuation-in-part of application No. PCT/US2020/048843, filed on Aug. 31, 2020.
(63) Continuation-in-part of application No. PCT/US2020/048843, filed on Aug. 31, 2020.
(63) Continuation-in-part of application No. PCT/US2019/049259, filed on Sep. 2, 2019.
(63) Continuation-in-part of application No. PCT/US2018/051392, filed on Sep. 17, 2018.
(63) Continuation-in-part of application No. PCT/US2018/020818, filed on Mar. 3, 2018.
(63) Continuation-in-part of application No. 15/644,778, filed on Jul. 8, 2017, now Pat. No. 11,111,505.
(63) Continuation-in-part of application No. PCT/US2017/041277, filed on Jul. 8, 2017.
(63) Continuation-in-part of application No. 15/462,855, filed on Mar. 19, 2017, now Pat. No. 10,596,274.
(63) Continuation-in-part of application No. PCT/US2017/023112, filed on Mar. 19, 2017.
Application No. 15/644,778 is a continuation-in-part of application No. 15/462,855, filed on Mar. 19, 2017, now Pat. No. 10,596,274.
(60) Provisional application No. 63/200,329, filed on Mar. 1, 2021.
(60) Provisional application No. 63/200,329, filed on Mar. 1, 2021.
(60) Provisional application No. 63/136,177, filed on Jan. 11, 2021.
(60) Provisional application No. 63/136,177, filed on Jan. 11, 2021.
(60) Provisional application No. 62/985,741, filed on Mar. 5, 2020.
(60) Provisional application No. 62/985,741, filed on Mar. 5, 2020.
(60) Provisional application No. 62/943,207, filed on Dec. 3, 2019.
(60) Provisional application No. 62/894,926, filed on Sep. 2, 2019.
(60) Provisional application No. 62/894,853, filed on Sep. 1, 2019.
(60) Provisional application No. 62/894,852, filed on Sep. 1, 2019.
(60) Provisional application No. 62/894,849, filed on Sep. 1, 2019.
(60) Provisional application No. 62/821,434, filed on Mar. 20, 2019.
(60) Provisional application No. 62/732,528, filed on Sep. 17, 2018.
(60) Provisional application No. 62/728,056, filed on Sep. 6, 2018.
(60) Provisional application No. 62/728,056, filed on Sep. 6, 2018.
(60) Provisional application No. 62/726,294, filed on Sep. 2, 2018.
(60) Provisional application No. 62/726,294, filed on Sep. 2, 2018.
(60) Provisional application No. 62/726,293, filed on Sep. 2, 2018.
(60) Provisional application No. 62/726,293, filed on Sep. 2, 2018.
(60) Provisional application No. 62/564,991, filed on Sep. 28, 2017.
(60) Provisional application No. 62/564,991, filed on Sep. 28, 2017.
(60) Provisional application No. 62/564,253, filed on Sep. 27, 2017.
(60) Provisional application No. 62/564,253, filed on Sep. 27, 2017.
(60) Provisional application No. 62/560,176, filed on Sep. 18, 2017.
(60) Provisional application No. 62/560,176, filed on Sep. 18, 2017.
(60) Provisional application No. 62/467,039, filed on Mar. 3, 2017.
(60) Provisional application No. 62/467,039, filed on Mar. 3, 2017.
(60) Provisional application No. 62/467,039, filed on Mar. 3, 2017.
(60) Provisional application No. 62/467,039, filed on Mar. 3, 2017.
(60) Provisional application No. 62/467,039, filed on Mar. 3, 2017.
(60) Provisional application No. 62/467,039, filed on Mar. 3, 2017.
(60) Provisional application No. 62/360,041, filed on Jul. 8, 2016.
(60) Provisional application No. 62/360,041, filed on Jul. 8, 2016.
(60) Provisional application No. 62/360,041, filed on Jul. 8, 2016.
(60) Provisional application No. 62/360,041, filed on Jul. 8, 2016.
(60) Provisional application No. 62/360,041, filed on Jul. 8, 2016.
(60) Provisional application No. 62/390,093, filed on Mar. 19, 2016.
(60) Provisional application No. 62/390,093, filed on Mar. 19, 2016.
(60) Provisional application No. 62/390,093, filed on Mar. 19, 2016.
(60) Provisional application No. 62/390,093, filed on Mar. 19, 2016.

(51) Int. Cl. A61K 47/69; A61K 47/62; C12N 15/113; C07K 16/28; C07K 14/725; C07K 16/42; C12N 15/86; C12N 9/64; A61K 39/00

(52) U.S. Cl. CPC C07K 16/4258; A61K 39/4611; A61K 39/4613; A61K 39/4637; A61K 39/4643; A61K 47/62; A61K 47/6901; C07K 14/7051; C07K 16/2803; C07K 16/2809; C07K 16/2863; C12N 9/6472; C12N 15/1136; C12N 15/86; C12Y 304/22055; A61K 2239/21; A61K 2239/22; A61K 2239/29; C07K 2317/31; C07K 2317/567; C07K 2317/622; C07K 2317/73; C07K 2317/76; C07K 2319/02; C07K 2319/03; C07K 2319/33; C07K 2319/50; C07K 2319/75; C12N 2310/14; C12N 2740/15043; C12N 2810/852; C12N 2840/002; C12N 2840/007; C12N 2840/203

(57) ABSTRACT

The present disclosure provides methods and compositions that include a polynucleotide that includes nucleic acids that encode an anti-idiotype polypeptide, as well as polypeptides that are encoded by the same, and cells that include and express the polypeptide. Disclosed methods include methods that utilize the anti-idiotype polypeptides as safety switches when they are used in combination with antibodies, include approved biologic antibodies, that include the recognized idiotype. Certain embodiments include anti-idiotype polypeptides and nucleotides encoding the same, that include an internal domain. This internal domain in some embodiments has functional domains that can induce proliferation or cell death upon binding of the anti-idiotype polypeptide by its target antibody.

### CROSS-REFERENCE TO RELATED APPLICATIONS

[0001] This application claims priority to International Application No. PCT/US2021/020922, filed Mar. 4, 2021; International Application No. PCT/US2020/048843, filed Aug. 31, 2020; U.S. Provisional Application No. 63/200,329, filed Mar. 1, 2021; and U.S. Provisional Application No. 63/136,177, filed Jan. 11, 2021; International Application No. PCT/US2021/020922, filed Mar. 4, 2021 claims priority to U.S. Provisional Application No. 62/985,741, filed Mar. 5, 2020; International Application No. PCT/US2020/048843, filed Aug. 31, 2020; U.S. Provisional Application No. 63/136,177, filed Jan. 11, 2021; and U.S. Provisional Application No. 63/200,329, filed Mar. 1, 2021; International Application No. PCT/US2020/048843, filed Aug. 31, 2020 is a continuation-in-part of International Application No. PCT/US2019/049259, filed Sep. 2, 2019; and claims the benefit of U.S. Provisional Application No. 62/894,849, filed Sep. 1, 2019; U.S. Provisional Application No. 62/894,852, filed Sep. 1, 2019; U.S. Provisional Application No. 62/894,853, filed Sep. 1, 2019; U.S. Provisional Application No. 62/894,926, filed Sep. 2, 2019; U.S. Provisional Application No. 62/943,207, filed Dec. 3, 2019; and U.S. Provisional Application No. 62/985,741, filed Mar. 5, 2020; International Application No. PCT/US2019/049259 is a continuation-in-part of International Application No. PCT/US2018/051392 filed Sep. 17, 2018; and claims the benefit of U.S. Provisional Application No. 62/726,293, filed Sep. 2, 2018; U.S. Provisional Application No. 62/726,294, filed Sep. 2, 2018; U.S. Provisional Application No. 62/728,056 filed Sep. 6, 2018; U.S. Provisional Application No. 62/732,528, filed Sep. 17, 2018; U.S. Provisional Application No. 62/821,434, filed Mar. 20, 2019; and U.S. Provisional Application No. 62/894,853, filed Sep. 1, 2019; International Application No. PCT/US2018/051392 is a continuation-in-part of International Application No. PCT/US2018/020818, filed Mar. 3, 2018; and claims the benefit of U.S. Provisional Application No. 62/560,176, filed Sep. 18, 2017; U.S. Provisional Application No. 62/564,253, filed Sep. 27, 2017; U.S. Provisional Application No. 62/564,991, filed Sep. 28, 2017; and U.S. Provisional Application No. 62/728,056, filed Sep. 6, 2018; International Application No. PCT/US2018/020818 is a continuation-in-part of International Application No. PCT/US2017/023112 filed Mar. 19, 2017; a continuation-in-part of International Application No. PCT/US2017/041277 filed Jul. 8, 2017; a continuation-in-part of U.S. Application No. 15/462,855 filed Mar. 19, 2017; and a continuation-in-part of U.S. Application No. 15/644,778 filed Jul. 8, 2017; and claims the benefit of U.S. Provisional Application No. 62/467,039 filed Mar. 3, 2017; U.S. Provisional Application No. 62/560,176 filed Sep. 18, 2017; U.S. Provisional Application No. 62/564,253 filed Sep. 27, 2017; and U.S. Provisional Application No. 62/564,991 filed Sep. 28, 2017; International Application No. PCT/US2017/023112 claims the benefit of U.S. Provisional Application No. 62/390,093, filed Mar. 19, 2016; U.S. Provisional Application No. 62/360,041, filed Jul. 8, 2016; and U.S. Provisional Application No. 62/467,039, filed Mar. 3, 2017; International Application No. PCT/US2017/041277 claims the benefit of International Application No. PCT/US2017/023112, filed Mar. 19, 2017; U.S. Pat. Application No. 15/462,855, filed Mar. 19, 2017; U.S. Provisional Application No. 62/360,041, filed Jul. 8, 2016; and U.S. Provisional Application No. 62/467,039, filed Mar. 3, 2017; U.S. Application No. 15/462,855 claims the benefit of U.S. Provisional Application No. 62/390,093, filed Mar. 19, 2016; U.S. Provisional Application No. 62/360,041, filed Jul. 8, 2016; and U.S. Provisional Application No. 62/467,039, filed Mar. 3, 2017; U.S. Application No. 15/644,778 is a continuation-in-part of International Application No. PCT/US2017/023112, filed Mar. 19, 2017; and a continuation-in-part of U.S. Pat. Application No. 15/462,855, filed Mar. 19, 2017; and claims the benefit of U.S. Provisional Application No. 62/360,041, filed Jul. 8, 2016, and U.S. Provisional Application No. 62/467,039, filed Mar. 3, 2017. These applications are incorporated by reference herein in their entireties.

### SEQUENCE LISTING

[0002] This application hereby incorporates by reference the material of the electronic Sequencing Listing filed concurrently herewith. The materials in the electronic Sequence Listing is submitted as a text (.txt) file entitled “F1_007_WO_01_Sequence_Listing” created on Aug. 31, 2021, which has a file size of 729 KB, and is herein incorporated by reference in its entirety.

### FIELD OF INVENTION

[0003] This disclosure relates to the field of immunology, or more specifically, to the genetic modification of T lymphocytes or other immune cells, and methods of controlling proliferation of such cells.

### BACKGROUND OF THE DISLOSURE

[0004] Lymphocytes from a subject (e.g., patient) can be genetically modified ex vivo or in vivo to express synthetic proteins that enable redirected engagement with other cells and environments based upon the genetic programs incorporated. Examples of such synthetic proteins include engineered T cell receptors (TCRs) and chimeric antigen receptors (CARs). Such lymphocytes have become important therapeutics (e.g. CAR-T therapy) for treating diseases such as cancer.

[0005] Although efficacy for some cell therapies has been impressive and even curative for some patients and some cancers, safety remains a concern for therapies that use genetically modified cells, such as lymphocytes. For example, there is a risk that genetically modified cells introduced into a subject can become oncogenic for example due to the insertional site of a transgene within a target cell’s genome. For CAR-T, safety concerns arise for example because CAR-T cells can bind their target at sites other than tumors (i.e. on-target, off-tumor), thus leading to undesirable side effects. Furthermore, on-target and on-tumor toxicities can arise such as tumor lysis syndrome, cytokine release syndrome, and macrophage activation syndrome. Some of the adverse events of CAR-T cells can furthermore include painful and/or dangerous neurotoxicity including IEC-associated neurotoxicity syndrome (ICANS).

[0006] Accordingly, genetic safety switches have been developed to attempt to address these safety issues, by providing a means to kill genetically modified cells in a patient. However, these safety switches are time-consuming to develop and have limited design flexibility. For example, some safety switches require modifying a natural target for an approved antibody biologic, that is still capable of binding the antibody specifically. For example, previously disclosed safety switches include cell surface molecules that are truncated tyrosine kinase receptors. In some of these examples, the truncated tyrosine kinase receptor is a member of the epidermal growth factor receptor (EGFR) family (e.g., ErbB1 (HER1), ErbB2, ErbB3, and ErbB4), for example as disclosed in U.S. Pat. 8,802,374 or WO2018226897. Thus, some of these safety switches are polypeptides that are recognized by an antibody that recognizes the extracellular domain of an EGFR member. Such truncated EGFR polypeptides are sometimes referred to herein as eTags. An eTag was demonstrated to have cell killing potential through Erbitux® mediated antibody dependent cellular cytotoxicity (ADCC) pathways.

[0007] There are a number of drawbacks with current safety switches, and they fail to meet a number of long-standing challenges for cell therapy. One drawback with eTags is that they include EGFR family member domains, and thus are limited in structure to only EGFR domains. Furthermore, they may yield undesirable side effects when delivered to a subject since they are structurally related to growth factors (e.g. EGFR) found in a subject. Thus, there remains a need for a more flexible system to generate safety switches, that can utilize virtually any antibody, including virtually any approved antibody biologic, that can be constructed using established technologies, and that does not require delivery of modified growth factor receptors extracellular domains. Furthermore, there remains a long-standing challenge in cell therapies that use genetically modified cells, such as CAR-T, to provide genetic tools that are flexible and relatively easy to develop, that can be used to modify virtually any activity of the cell, including, but not limited to, inducing proliferation or cell death of the genetically modified cells.

### SUMMARY

[0008] Provided herein are methods, uses, compositions, and kits that help overcome issues related to prior art safety switches and to the effectiveness and safety of methods for performing cell therapy. The anti-idiotype polypeptide safety switches provided herein, are much more robust and flexible safety switches than prior art safety switches, such as eTags, in terms of design and development. Anti-idiotype polypeptide safety switches can be designed to be recognized by virtually any antibody, including any clinical antibody, such as a therapeutic antibody. Exemplary methods for developing anti-idiotype antibodies, are known.

[0009] Accordingly, in some aspects, provided herein are methods, compositions, and kits that are, or include or encode, anti-idiotype polypeptides. Furthermore, provided herein are methods for delivering modified lymphocytes, especially modified and genetically modified T cell and/or NK cells, and/or for regulating the activity of transduced, genetically modified, and/or modified T cells and/or NK cells. Such methods, compositions, and kits provide improved efficacy and safety over current technologies, especially with respect to T cells and/or NK cells that express lymphoproliferative elements (e.g., chimeric cytokine receptors), engineered T cell receptors (TCRs), and chimeric antigen receptors (CARs), including microenvironment restricted biologic (“MRB”) CARs. Transduced and/or modified and in illustrative embodiments genetically modified T cells and/or NK cells that are produced by and/or used in methods provided herein, include anti-idiotype functionality typically, in combination with other functionality, in illustrative embodiments delivered from retroviral (e.g., lentiviral) genomes via retroviral (e.g., lentiviral) particles. The anti-idiotype polypeptides, or polynucleotides encoding the same, alone or in combination with other functionality, provide improved features for such cells, including safety features and for methods that utilize such cells, such as research methods, commercial production methods, and adoptive cellular therapy. For example, such cells can be controllably killed if they become safety concerns to subjects in which they are delivered, and can have improved growth properties that can be better regulated.

[0010] In one aspect, provided herein is a polynucleotide, comprising one or more transcriptional units, wherein each of the one or more transcriptional units is operatively linked to a promoter wherein the one or more transcriptional units comprise:
[0011] a) a polynucleotide sequence encoding one or more inhibitory RNA molecules and/or a first engineered signaling polypeptide, and
[0012] b) a polynucleotide sequence encoding an anti-idiotype polypeptide comprising an extracellular recognition domain and a membrane association domain, wherein the extracellular recognition domain comprises a domain that recognizes an idiotype of a target antibody or a target antibody mimetic.

[0013] In one aspect, provided herein is a method for administering a cell therapy to a mammalian subject, said method comprising administering modified cells to the mammalian subject, wherein the modified cells each comprise a polynucleotide encoding: a) one or more inhibitory RNA molecules and/or a first engineered polypeptide, and b) an anti-idiotype polypeptide comprising an extracellular recognition domain and a membrane association domain, wherein the extracellular recognition domain comprises a domain that recognizes an idiotype of a target antibody or a target antibody mimetic.

[0014] In one aspect, provided herein is a method for administering a gene therapy to a mammalian subject, said method comprising administering gene vectors to the mammalian subject, wherein the gene vectors each comprise a polynucleotide encoding: a) one or more inhibitory RNA molecules and/or a first engineered polypeptide, and b) an anti-idiotype polypeptide comprising an extracellular recognition domain and a membrane association domain, wherein the extracellular recognition domain comprises a domain that recognizes an idiotype of a target antibody or a target antibody mimetic.

[0015] In some embodiments, the anti-idiotype polypeptide is capable of binding to an idiotype of a clinical stage or approved target antibody or antibody mimetic. Such target antibody or antibody mimetic can be capable of, adapted for, configured to, and/or effective for promoting cell death.

[0016] In some embodiments, the anti-idiotype polypeptide further include one or more intracellular domains. The intracellular signaling domains can activate or inhibit pro-apoptotic or anti-apoptotic pathways and/or pro-survival or anti-survival pathways.

[0017] Further details regarding aspects and embodiments of the present disclosure are provided throughout this patent application. Sections and section headers are for ease of reading and are not intended to limit combinations of disclosure, such as methods, compositions, and kits or functional elements therein across sections.

### BRIEF DESCRIPTION OF THE DRAWINGS

[0018] FIG. 1 shows a non-limiting example of a polynucleotide that is a portion of a lentiviral vector, with nucleic acids that encode an anti-idiotype polypeptide includes an anti-idiotype extracellular recognition domain (“Anti-idiotype”), a stalk, and a membrane association domain (MAD). The vector also includes a promoter (“Promoter”) positioned to drive expression of nucleic acids encoding different functional polypeptides including the anti-idiotype polypeptide, and includes various functional domains as indicated, including various viral functional domains, and encodes an inhibitory RNA molecule within the promoter.

[0019] FIGS. 2A-G show non-limiting examples of polynucleotides that include nucleic acids that encode one or more anti-idiotype polypeptides in various combinations with other polypeptides. FIG. 2A shows nucleic acids that encode an anti-idiotype polypeptide with a membrane association domain (MAD) and an anti-idiotype extracellular recognition domain (referred to as “anti-idiotype” in FIGS. 2). FIGS. 2B-D show an anti-idiotype polypeptide expressed as part of a single polynucleotide that also encodes a chimeric antigen receptor (CAR) or an engineered T cell receptor (TCR) (FIG. 2B), a lymphoproliferative element (FIG. 2C), or a cytokine (FIG. 2D). FIGS. 2E-G shows an anti-idiotype polypeptide is expressed as part of a single polynucleotide that also encodes a CAR or a TCR, an anti-idiotype polypeptide, along with a lymphoproliferative element (FIG. 2E), or a cytokine (FIG. 2F), or both a lymphoproliferative element and a cytokine (FIG. 2G).

[0020] FIGS. 3A-G show non-limiting examples of anti-idiotype polypeptides. FIG. 3A shows an anti-idiotype polypeptide with an extracellular recognition domain (sometimes referred to as an anti-idiotype extracellular recognition domain, anti-id ERD, or anti-id ECD, and denoted in FIGS. 3A-F and FIG. 3H as “anti-idiotype”), a stalk, and a membrane association domain (MAD). FIGS. 3B-3G show anti-idiotype polypeptides with one or more intracellular domains (sometimes referred to herein as ICDs) and a transmembrane domain (“TM” in FIGS. 3B-3G). FIG. 3B shows the anti-idiotype polypeptide with a single intracellular domain. FIGS. 3C-E shows the anti-idiotype polypeptide with either the P3 domain, and optionally a P4 domain, of a lymphoproliferative element (FIG. 3C), or with the intracellular domain of a CAR or TCR (FIG. 3D), or with the intracellular domain of a death domain. FIG. 3F shows an anti-idiotype polypeptide with the anti-id ERD as one of the ASTRs of a bi-specific CAR or TCR. FIG. 3G shows an anti-idiotype polypeptide similar to FIG. 3B, but with a cleavage site between or as part of the transmembrane domain and the ICD.

[0021] FIGS. 4 shows show non-limiting examples of anti-idiotype polypeptides.

[0022] FIGS. 5A and 5B show schematics of illustrative bicistronic lentiviral genomic vectors with divergent transcriptional units.

[0023] FIG. 6A shows the panning round, phage input (pfu), bead volume, binding time, number of washes, phage output (pfu) recovery rate, and enrichment for Panning Experiment 1 using Dynabeads™ Protein A.

[0024] FIG. 6B shows the panning round, phage input (pfu), bead volume, binding time, number of washes, phage output (pfu) recovery rate, and enrichment for Panning Experiment 1 using Dynabeads™ M-270 Epoxy

[0025] FIG. 7 shows the binding of the phage output from rounds 1-5 of Panning Experiment 1 to cetuximab as measured by ELISA. Phage were eluted from Dynabeads™ M-270 Epoxy using Elution Buffer in each panning round except as indicated for R5 in which bound phage were eluted with EGFR.

[0026] FIG. 8 shows sequence information for the 19 unique clones identified in Panning Experiment 1 using Ab1.1 as bait

[0027] FIGS. 9A-9C shows sequence information for the 42 unique clones identified in Panning Experiment 2 using Ab1.2 as bait

[0028] FIG. 10 shows the results of a competitive binding assay in which soluble EGFR competed with monoclonal phage clones from Panning Experiment 2 for binding to cetuximab by ELISA.

[0029] FIG. 11 shows a schematic of an illustrative lentiviral genomic vector with a single transcriptional unit encoding a CAR and an anti-idiotype polypeptide separated by a ribosomal skip sequence.

[0030] FIG. 12 shows the expression of 2 different cetuximab anti-idiotype polypeptides on 293T and CHO-S cells as detected by cetuximab and assayed by FACs.

### DEFINITIONS

[0031] As used herein, the term “chimeric antigen receptor” or “CAR” or “CARs” refers to engineered receptors, which graft an antigen specificity onto cells, for example T cells, NK cells, macrophages, and stem cells. The CARs of the invention include at least one antigen-specific targeting region (ASTR), a transmembrane domain (TM), and an intracellular activating domain (IAD) and can include a stalk, and one or more co-stimulatory domains (CSDs). In another embodiment, the CAR is a bispecific CAR, which is specific to two different antigens or epitopes. After the ASTR binds specifically to a target antigen, the IAD activates intracellular signaling. For example, the IAD can redirect T cell specificity and reactivity toward a selected target in a non-MHC-restricted manner, exploiting the antigen-binding properties of antibodies. The non-MHC-restricted antigen recognition gives T cells expressing the CAR the ability to recognize an antigen independent of antigen processing, thus bypassing a major mechanism of tumor escape. Moreover, when expressed in T cells, CARs advantageously do not dimerize with endogenous T cell receptor (TCR) alpha and beta chains.

[0032] As used herein, the term cell “aggregate” means a cluster of cells that adhere to each other.

[0033] As used herein, the term “constitutive T cell or NK cell promoter” refers to a promoter which, when operably linked with a polynucleotide that encodes or specifies a gene product, causes the gene product to be produced in a cell under most or all physiological conditions of the cell.

[0034] As used herein, the terms “inducible promoter” or “activatable promoter” refer to promoters that when operably linked with a polynucleotide that encodes or specifies a gene product, cause the gene product to be produced in a cell substantially only when a promoter-specific inducer is present in the cell. Inducible promoters have no, or a low level, of basal transcription activity but the transcription activity increases, sometimes greatly, in the presence of an inducing signal.

[0035] As used herein, the term “insulator” refers to a cis-regulatory element that mediates intra- and inter-chromosomal interactions and can block interactions between enhancers and promoters. Typically, insulators are between 200 and 2000 base pairs in length and contain clustered binding sites for sequence specific DNA-binding proteins.

[0036] As used herein, the term “microenvironment” means any portion or region of a tissue or body that has constant or temporal, physical, or chemical differences from other regions of the tissue or regions of the body. For example, a “tumor microenvironment” as used herein refers to the environment in which a tumor exists, which is the non-cellular area within the tumor and the area directly outside the tumorous tissue but does not pertain to the intracellular compartment of the cancer cell itself. The tumor microenvironment can refer to any and all conditions of the tumor milieu including conditions that create a structural and or functional environment for the malignant process to survive and/or expand and/or spread. For example, the tumor microenvironment can include alterations in conditions such as, but not limited to, pressure, temperature, pH, ionic strength, osmotic pressure, osmolality, oxidative stress, concentration of one or more solutes, concentration of electrolytes, concentration of glucose, concentration of hyaluronan, concentration of lactic acid or lactate, concentration of albumin, levels of adenosine, levels of R-2-hydroxyglutarate, concentration of pyruvate, concentration of oxygen, and/or presence of oxidants, reductants, or co-factors, as well as other conditions a skilled artisan will understand.

[0037] As used interchangeably herein, the terms “polynucleotide” and “nucleic acid” refer to a polymeric form of nucleotides of any length, either ribonucleotides or deoxyribonucleotides. Thus, this term includes, but is not limited to, single-, double-, or multi-stranded DNA or RNA, genomic DNA, cDNA, DNA-RNA hybrids, or a polymer comprising purine and pyrimidine bases or other natural, chemically or biochemically modified, non-natural, or derivatized nucleotide bases.

[0038] As used herein, an “approved biologic” is a macromolecule that meets the requirements of a biologic provided by a government regulatory agency such as, but not limited to, the Food And Drug Administration of the U.S. (USFDA), European Medicines Agency (EMA), National Medical Products Administration of China (NMPA) (Chinese FDA), or the Pharmaceutical and Food Safety Bureau (PFSB) of Japan and has been approved by such regulatory agency either as a stand-alone biologic, or as part of a combination product or method.

[0039] As used herein, the term “antibody” includes polyclonal and monoclonal antibodies, including intact antibodies and fragments of antibodies which retain specific binding to antigen. The antibody fragments can be, but are not limited to, fragment antigen binding (Fab) fragments, Fab′ fragments, F(ab′)₂ fragments, Fv fragments, Fab′-SH fragments, (Fab′)₂ Fv fragments, Fd fragments, recombinant IgG (rIgG) fragments, single-chain antibody fragments, including single-chain variable fragments (scFv), divalent scFv’s, trivalent scFv’s, and single domain antibody fragments (e.g., sdAb, sdFv, nanobody). The term includes genetically engineered and/or otherwise modified forms of immunoglobulins, such as intrabodies, peptibodies, chimeric antibodies, single-chain antibodies, fully human antibodies, humanized antibodies, fusion proteins including an antigen-specific targeting region of an antibody and a non-antibody protein, heteroconjugate antibodies, multispecific, e.g., bispecific, antibodies, diabodies, triabodies, and tetrabodies, tandem di-scFv’s, and tandem tri-scFv’s. Unless otherwise stated, the term “antibody” should be understood to include functional antibody fragments thereof. The term also includes intact or full-length antibodies, including antibodies of any class or sub-class, including IgG and subclasses thereof, IgM, IgE, IgA, and IgD.

[0040] As used herein, the term “antibody fragment” includes a portion of an intact antibody, for example, the antigen binding or variable region of an intact antibody. Examples of antibody fragments include Fab, Fab′, F(ab′)₂, and Fv fragments; diabodies; linear antibodies (Zapata et al., Protein Eng. 8(10): 1057-1062 (1995)); single-chain antibody molecules; and multispecific antibodies formed from antibody fragments. Papain digestion of antibodies produces two identical antigen-binding fragments, called “Fab” fragments, each with a single antigen-binding site, and a residual “Fe” fragment, a designation reflecting the ability to crystallize readily. Pepsin treatment yields an F(ab′)₂ fragment that has two antigen combining sites and is still capable of cross-linking antigen.

[0041] As used interchangeably herein, the terms “single-chain Fv,” “scFv,” or “sFv” antibody fragments include the V_{H} and V_{L} domains of antibody, wherein these domains are present in a single polypeptide chain. In some embodiments, the Fv polypeptide further includes a polypeptide linker or spacer between the V_{H} and V_{L} domains, which enables the sFv to form the desired structure for antigen binding. For a review of sFv, see Pluckthun in The Pharmacology of Monoclonal Antibodies, vol. 113, Rosenburg and Moore eds., Springer-Verlag, New York, pp. 269-315 (1994).

[0042] As used herein, “naturally occurring” VH and VL domains refer to VH and VL domains that have been isolated from a host without further molecular evolution to change their affinities when generated in an scFv format under specific conditions such as those disclosed in U.S. Pat. 8709755 B2 and application WO/2016/033331A1.

[0043] As used herein, “antibody mimetic” refers to an organic compound that specifically binds a target sequence and has a structure distinct from a naturally-occurring antibody. Antibody mimetics may comprise a protein, a nucleic acid, or a small molecule, and a skilled artisan can understand when each type is relevant. The target sequence to which an antibody mimetic of the disclosure specifically binds may be an antigen. Antibody mimetics may provide superior properties over antibodies including, but not limited to, superior solubility, tissue penetration, stability towards heat and enzymes (e.g., resistance to enzymatic degradation), and lower production costs. Antibody mimetics include, but are not limited to, an affibody, an afflilin, an affimer, an affitin, an alphabody, an alphamab, an anticalin, a peptide aptamer, an armadillo repeat protein, an atrimer, an avimer (also known as avidity multimer), a C-type lectin domain, a cysteine-knot miniprotein, a cyclic peptide, a cytotoxic T-lymphocyte associated protein-4, a DARPin (Designed Ankyrin Repeat Protein),7 a fibrinogen domain, a fibronectin binding domain (FN3 domain) (e.g., adnectin or monobody), a fynomer, a knottin, a Kunitz domain peptide, a nanofitin, a leucine-rich repeat domain, a lipocalin domain, a mAb 2 or Fcab™, a nanobody, a nanoCLAMP, an OBody, a Pronectin, a single-chain TCR, a tetratricopeptide repeat domain, VHH, or a V-like domain.

[0044] As used herein, “complementarity-determining region” or “CDR” refers to the three hypervariable regions in each variable chain of immunoglobulins and T cell receptors that interrupt the four “framework” regions of the chains. The CDRs are primarily responsible for the specificity of binding. The CDRs of each immunoglobulin chain are referred to as CDR1, CDR2, and CDR3, numbered sequentially starting from the N-terminus, and are also typically identified by the chain in which the particular CDR is located. Thus, HCDR3 is located in the variable domain of the heavy chain of the antibody in which it is found, whereas a LCDR1 is the CDR1 from the variable domain of the light chain of the antibody in which it is found. The sequences of the framework regions of different light or heavy chains are relatively conserved within a species. The framework region of an antibody, that is the combined framework regions of the constituent light and heavy chains, serves to position and align the CDRs in three dimensional space. The amino acid sequences of the CDRs and framework regions can be determined using various well-known definitions in the art, e.g., Kabat, Chothia, international ImMunoGeneTics database (IMGT), and AbM (see, e.g., Johnson and Wu, Nucleic Acids Res. 2000 Jan 1; 28(1): 214-218 and Johnson et al., Nucleic Acids Res., 29:205-206 (2001); Chothia & Lesk, (1987) J. Mol. Biol. 196, 901-917; Chothia et al. (1989) Nature 342, 877-883; Chothia et al. (1992) J. Mol. Biol. 227, 799-817; Al-Lazikam et al., J. Mol. Biol. 1997, 273(4)). Unless otherwise indicated, CDRs herein are determined using “Fab Analysis” on the World Wide Web at vbase2.org (Retter et al., Nucleic Acids Res., 33:D671-D674 and Mollova et al., BMC Systems Bio., S1, p30)).

[0045] As used herein, the term “idiotype” refers to the segment of an antibody or antibody mimetic that determines its specificity for antigen, for example, a structure of a variable region of an antibody, T cell receptor, or antibody mimetic that is shared characteristic between a group of antibodies, T-cell receptors, or antibody mimetics based upon the antigen binding specificity and therefore structure of their variable regions. The idiotype of an antibody typically includes the variable region, e.g., the CDRs and framework regions. For antibodies, the idiotype is located in the Fab region. For antibodies formed with multiple chains, e.g., heavy chains and light chains, expression of the idiotype usually requires participation of the variable regions of both heavy and light chains that form the antigen-combining site. For antibodies formed with single chains, e.g., scFv, expression of the idiotype usually requires participation of the variable regions of one polypeptide that forms the antigen-combining site. For antibody mimetics, the idiotype varies depending on the type of antibody mimetic, but includes the region necessary for binding the cognate antigen.

[0046] As used herein, a “therapeutic antibody” or “therapeutic antibody mimetic” is an antibody or antibody mimetic that has been demonstrated using an in vivo assay, for example, in humans, to have therapeutic activity.

[0047] As used herein, the term “recognize” refers to the ability of one molecule to bind to another molecule, for example, the ability of a receptor to binds its ligand or the ability of an antibody to bind its target.

[0048] As used herein, the term “affinity” refers to the equilibrium constant for the reversible binding of two agents and is expressed as a dissociation constant (Kd). Affinity can be at least 1-fold greater, at least 2-fold greater, at least 3-fold greater, at least 4-fold greater, at least 5-fold greater, at least 6-fold greater, at least 7-fold greater, at least 8-fold greater, at least 9-fold greater, at least 10-fold greater, at least 20-fold greater, at least 30-fold greater, at least 40-fold greater, at least 50-fold greater, at least 60-fold greater, at least 70-fold greater, at least 80-fold greater, at least 90-fold greater, at least 100-fold greater, or at least 1000-fold greater, or more, than the affinity of an antibody for unrelated amino acid sequences. Affinity of an antibody to a target protein can be, for example, from about 100 nanomolar (nM) to about 0.1 nM, from about 100 nM to about 1 picomolar (pM), or from about 100 nM to about 1 femtomolar (fM) or more. As used herein, the term “avidity” refers to the resistance of a complex of two or more agents to dissociation after dilution. The terms “immunoreactive” and “preferentially binds” are used interchangeably herein with respect to antibodies and/or antigen-binding fragments.

[0049] As used herein, the term “binding” refers to a direct association between two molecules, due to, for example, covalent, electrostatic, hydrophobic, and ionic and/or hydrogen-bond interactions, including interactions such as salt bridges and water bridges. Non-specific binding would refer to binding with an affinity of less than about 10⁻⁷ M, e.g., binding with an affinity of 10⁻⁶ M, 10⁻⁵ M, 10⁻⁴ M, etc.

[0050] As used herein, reference to a “cell surface expression system” or “cell surface display system” refers to the display or expression of a protein or portion thereof on the surface of a cell. Typically, a cell is generated that expresses proteins of interest fused to a cell-surface protein. For example, a protein is expressed as a fusion protein with a transmembrane domain.

[0051] As used herein, the term “element” includes polypeptides, including fusions of polypeptides, regions of polypeptides, and functional mutants or fragments thereof and polynucleotides, including microRNAs and shRNAs, and functional mutants or fragments thereof.

[0052] As used herein, the term “region” is any segment of a polypeptide or polynucleotide.

[0053] As used herein, a “domain” is a region of a polypeptide or polynucleotide with a functional and/or structural property.

[0054] As used herein, the terms “stalk” or “stalk domain” refer to a flexible polypeptide connector region providing structural flexibility and spacing to flanking polypeptide regions and can consist of natural or synthetic polypeptides. A stalk can be derived from a hinge or hinge region of an immunoglobulin (e.g., IgGl) that is generally defined as stretching from Glu216 to Pro230 of human IgG1 (Burton (1985) Molec. Immunol., 22: 161-206). Hinge regions of other IgG isotypes may be aligned with the IgG1 sequence by placing the first and last cysteine residues forming inter-heavy chain disulfide (S-S) bonds in the same positions. The stalk may be of natural occurrence or non-natural occurrence, including but not limited to an altered hinge region, as disclosed in U.S. Pat. No. 5,677,425. The stalk can include a complete hinge region derived from an antibody of any class or subclass. The stalk can also include regions derived from CD8, CD28, or other receptors that provide a similar function in providing flexibility and spacing to flanking regions.

[0055] As used herein, the term “isolated” means that the material is removed from its original environment (e.g., the natural environment if it is naturally occurring). For example, a naturally-occurring polynucleotide or polypeptide present in a living animal is not isolated, but the same polynucleotide or polypeptide, separated from some or all of the coexisting materials in the natural system, is isolated. Such polynucleotides could be part of a vector and/or such polynucleotides or polypeptides could be part of a composition, and still be isolated in that such vector or composition is not part of its natural environment.

[0056] As used herein, a “polypeptide” is a single chain of amino acid residues linked by peptide bonds. A polypeptide does not fold into a fixed structure nor does it have any posttranslational modification. A “protein” is a polypeptide that folds into a fixed structure. “Polypeptides” and “proteins” are used interchangeably herein.

[0057] As used herein, a polypeptide may be “purified” to remove contaminant components of a polypeptide’s natural environment, e.g., materials that would interfere with diagnostic or therapeutic uses for the polypeptide such as, for example, enzymes, hormones, and other proteinaceous or nonproteinaceous solutes. A polypeptide can be purified (1) to greater than 90%, greater than 95%, or greater than 98%, by weight of antibody as determined by the Lowry method, for example, more than 99% by weight, (2) to a degree sufficient to obtain at least 15 residues of N-terminal or internal amino acid sequence by use of a spinning cup sequenator, or (3) to homogeneity by sodium dodecyl sulfate-polyacrylamide gel electrophoresis (SDS-PAGE) under reducing or nonreducing conditions using Coomassie blue or silver stain.

[0058] As used herein, the term “immune cells” generally includes white blood cells (leukocytes) which are derived from hematopoietic stem cells (HSC) produced in the bone marrow. “Immune cells” includes, e.g., lymphocytes (T cells, B cells, natural killer (NK) cells) and myeloid-derived cells (neutrophil, eosinophil, basophil, monocyte, macrophage, dendritic cells).

[0059] As used herein, “T cell” includes all types of immune cells expressing CD3 including T-helper cells (CD4⁺ cells), cytotoxic T cells (CD8⁺ cells), T-regulatory cells (Treg) and gamma-delta T cells. NKT cells, which are CD3+, CD56+, and either CD4+ or CD8+, are considered a type of T cells herein. Surface expression of CD3 can be transiently decreased or eliminated in T cells, as has been observed with some of the methods for modifying T cells disclosed herein. Such modified CD4+ or CD8+ lymphocytes that have transiently decreased/absent CD3 surface expression, are still considered T cells in this disclosure. Reference to a “CD” or cluster of differentiation marker, such as CD3+, CD4+, CD8+, CD56+ herein, relates to surface expression of such polypeptide. It will be understood that surface expression is a continuum between positive and negative, and can be assessed by FACS analysis, where cells are determined to be positive or negative based on user cutoffs known in the art. A low and intermediate expression of a surface marker determined by FACS analysis, such as CD3lo or CD3int, are considered surface marker negative (e.g. CD3-) herein.

[0060] As used herein, “NK cell” includes lymphocytes that express CD56 on their surface (CD56+ lymphocytes). NKT cells, which are CD3+, CD56+, and either CD4+ or CD8+, are considered a type of NK cells herein.

[0061] As used herein, a “cytotoxic cell” includes CD8⁺ T cells, natural-killer (NK) cells, NK-T cells, γδ T cells, a subpopulation of CD4⁺ cells, and neutrophils, which are cells capable of mediating cytotoxicity responses.

[0062] As used herein, the term “stem cell” generally includes pluripotent or multipotent stem cells. “Stem cells” includes, e.g., embryonic stem cells (ES); mesenchymal stem cells (MSC); induced-pluripotent stem cells (iPS); and committed progenitor cells (hematopoietic stem cells (HSC); bone marrow derived cells, etc.).

[0063] As used herein, the terms “treatment,” “treating,” and the like, refer to obtaining a desired pharmacologic and/or physiologic effect. The effect may be prophylactic in terms of completely or partially preventing a disease or symptom thereof and/or may be therapeutic in terms of a partial or complete cure for a disease and/or adverse effect attributable to the disease. “Treatment,” as used herein, covers any treatment of a disease in a mammal, e.g., in a human, and includes: (a) preventing the disease from occurring in a subject which may be predisposed to the disease but has not yet been diagnosed as having it; (b) inhibiting the disease, i.e., arresting its development; and (c) relieving the disease, i.e., causing regression of the disease.

[0064] As used interchangeably herein, the terms “individual”, “subject”, “host”, and “patient” refer to a mammal, including, but not limited to, humans, murines (e.g., rats, mice), lagomorphs (e.g., rabbits), non-human primates, humans, canines, felines, ungulates (e.g., equines, bovines, ovines, porcines, caprines), etc.

[0065] As used herein, the terms “therapeutically effective amount” or “efficacious amount” refers to the amount of an agent, or combined amounts of two agents, that, when administered to a mammal or other subject for treating a disease, is sufficient to affect such treatment for the disease. The “therapeutically effective amount” will vary depending on the agent(s), the disease and its severity and the age, weight, etc., of the subject to be treated.

[0066] As used herein, the term “evolution” or “evolving” refers to using one or more methods of mutagenesis to generate a different polynucleotide encoding a different polypeptide, which is itself an improved biological molecule and/or contributes to the generation of another improved biological molecule. “Physiological” or “normal” or “normal physiological” conditions are conditions such as, but not limited to, pressure, temperature, pH, ionic strength, osmotic pressure, osmolality, oxidative stress, concentration of one or more solutes, concentration of electrolytes, concentration of glucose, concentration of hyaluronan, concentration of lactic acid or lactate, concentration of albumin, levels of adenosine, levels of R-2-hydroxyglutarate, concentration of pyruvate, concentration of oxygen, and/or presence of oxidants, reductants, or co-factors, as well as other conditions, that would be considered within a normal range at the site of administration, or at the tissue or organ at the site of action, to a subject.

[0067] As used herein, a “transduced cell” or a “stably transfected cell” is a cell that contains an exogenous nucleic acid(s) that is integrated into the genome of the cell. As used herein, a “genetically modified cell” is a cell that contains an exogenous nucleic acid(s) regardless of whether the exogenous nucleic acid(s) is integrated into the genome of the cell, and regardless of the method used to introduce the exogenous nucleic acid(s) into the cell. Exogenous nucleic acid(s) inside a cell that are not integrated into the genome of the cell can be referred to as “extrachromosomal” herein. As used herein, a “modified cell” is a cell that is associated with a recombinant nucleic acid vector (also called a “polynucleotide vector” or a “gene vector” herein), which in illustrative embodiments is a replication incompetent recombinant retroviral particle (also called a “RIR retroviral particle” or a “RIP” herein), that contains an exogenous nucleic acid, or a cell that has been genetically modified by an exogenous nucleic acid. Typically, in compositions and methods that include a replication incompetent recombinant retroviral particle, a modified cell associates with a replication incompetent recombinant retroviral particle through interactions between proteins on the surface of the cell and proteins on the surface of the replication incompetent recombinant retroviral particle, including pseudotyping elements and/or T cell activation elements. In compositions and methods that include transfection of nucleic acid inside a lipid-based reagent, such as a liposomal reagent, the lipid-based reagent containing nucleic acid, which is a type of recombinant nucleic acid vector, associates with the lipid bilayer of the modified cell before fusing or being internalized by the modified cell. Similarly, in compositions and methods that include chemical-based transfection of nucleic acid, such as polyethylenimine (PEI) or calcium phosphate-based transfection, the nucleic acid is typically associated with a positively charged transfection reagent to form the recombinant nucleic acid vector that associates with the negatively charged membrane of the modified cell before the complex is internalized by the modified cell. Other means or methods of stably transfecting or genetically modifying cells include electroporation, ballistic delivery, and microinjection. A “polypeptide” as used herein can include part of or an entire protein molecule as well as any posttranslational or other modifications.

[0068] A pseudotyping element as used herein can include a “binding polypeptide” that includes one or more polypeptides, typically glycoproteins, that identify and bind the target host cell, and one or more “fusogenic polypeptides” that mediate fusion of the retroviral and target host cell membranes, thereby allowing a retroviral genome to enter the target host cell. The “binding polypeptide” as used herein, can also be referred to as a “T cell and/or NK cell binding polypeptide” or a “target engagement element,” and the “fusogenic polypeptide” can also be referred to as a “fusogenic element”.

[0069] A “resting” lymphocyte, such as for example, a resting T cell, is a lymphocyte in the G0 stage of the cell cycle that does not express activation markers such as Ki-67. Resting lymphocytes can include naïve T cells that have never encountered specific antigen and memory T cells that have been altered by a previous encounter with an antigen. A “resting” lymphocyte can also be referred to as a “quiescent” lymphocyte.

[0070] As used herein, “lymphodepletion” involves methods that reduce the number of lymphocytes in a subject, for example by administration of a lymphodepletion agent. Lymphodepletion can also be attained by partial body or whole-body fractioned radiation therapy. A lymphodepletion agent can be a chemical compound or composition capable of decreasing the number of functional lymphocytes in a mammal when administered to the mammal. One example of such an agent is one or more chemotherapeutic agents. Such agents and dosages are known, and can be selected by a treating physician depending on the subject to be treated. Examples of lymphodepletion agents include, but are not limited to, fludarabine, cyclophosphamide, cladribine, denileukin diftitox, alemtuzumab or combinations thereof.

[0071] RNA interference (RNAi) is a biological process in which RNA molecules inhibit gene expression or translation by neutralizing targeted RNA molecules. The RNA target may be mRNA, or it may be any other RNA susceptible to functional inhibition by RNAi. As used herein, an “inhibitory RNA molecule” refers to an RNA molecule whose presence within a cell results in RNAi and leads to reduced expression of a transcript to which the inhibitory RNA molecule is targeted. An inhibitory RNA molecule as used herein has a 5′ stem and a 3′ stem that is capable of forming an RNA duplex. The inhibitory RNA molecule can be, for example, a miRNA (either endogenous or artificial) or a shRNA, a precursor of a miRNA (i.e., a Pri-miRNA or Pre-miRNA) or shRNA, or a dsRNA that is either transcribed or introduced directly as an isolated nucleic acid, to a cell or subject.

[0072] As used herein, “double stranded RNA” or “dsRNA” or “RNA duplex” refers to RNA molecules that are comprised of two strands. Double-stranded molecules include those comprised of two RNA strands that hybridize to form the duplex RNA structure or a single RNA strand that doubles back on itself to form a duplex structure. Most, but not necessarily all of the bases in the duplex regions are base-paired. The duplex region comprises a sequence complementary to a target RNA. The sequence complementary to a target RNA is an antisense sequence, and is frequently from 18 to 29, from 19 to 29, from 19 to 21, or from 25 to 28 nucleotides long, or in some embodiments between 18, 19, 20, 21, 22, 23, 24, 25 on the low end and 21, 22, 23, 24, 25, 26, 27, 28 29, or 30 on the high end, where a given range always has a low end lower than a high end. Such structures typically include a 5′ stem, a loop, and a 3′ stem connected by a loop which is contiguous with each stem and which is not part of the duplex. The loop comprises, in certain embodiments, at least 3, 4, 5, 6, 7, 8, 9, or 10 nucleotides. In other embodiments the loop comprises from 2 to 40, from 3 to 40, from 3 to 21, or from 19 to 21 nucleotides, or in some embodiments between 2, 3, 4, 5, 6, 7, 8, 9, 10, 11, 12, 13, 14, 15, 16, 17, 18, 19, or 20 on the low end and 10, 11, 12, 13, 14, 15, 16, 17, 18, 19, 20, 25, 30, 35, or 40 on the high end, where a given range always has a low end lower than a high end.

[0073] The term “microRNA flanking sequence” as used herein refers to nucleotide sequences including microRNA processing elements. MicroRNA processing elements are the minimal nucleic acid sequences which contribute to the production of mature microRNA from precursor microRNA. Often these elements are located within a 40-nucleotide sequence that flanks a microRNA stem-loop structure. In some instances, the microRNA processing elements are found within a stretch of nucleotide sequences of between 5 and 4,000 nucleotides in length that flank a microRNA stem-loop structure.

[0074] The term “linker” when used in reference to a multiplex inhibitory RNA molecule refers to a connecting means that joins two inhibitory RNA molecules.

[0075] As used herein, a “recombinant retrovirus” refers to a non-replicable, or “replication incompetent”, retrovirus unless it is explicitly noted as a replicable retrovirus. The terms “recombinant retrovirus” and “recombinant retroviral particle” are used interchangeably herein. Such retrovirus/retroviral particle can be any type of retroviral particle including, for example, gamma retrovirus, and in illustrative embodiments, lentivirus. As is known, such retroviral particles, for example lentiviral particles, typically are formed in packaging cells by transfecting the packing cells with plasmids that include packaging components such as Gag, Pol and Rev, an envelope or pseudotyping plasmid that encodes a pseudotyping element, and a transfer, genomic, or retroviral (e.g., lentiviral) expression vector, which is typically a plasmid on which a gene(s) or other coding sequence of interest is encoded. Accordingly, a retroviral (e.g., lentiviral) expression vector includes sequences (e.g., a 5′ LTR and a 3′ LTR flanking e.g., a psi packaging element and a target heterologous coding sequence) that promote expression and packaging after transfection into a cell. The terms “lentivirus” and “lentiviral particle” are used interchangeably herein.

[0076] A “framework” of a miRNA consists of “5′ microRNA flanking sequence” and/or “3′ microRNA flanking sequence” surrounding a miRNA and, in some cases, a loop sequence that separates the stems of a stem-loop structure in a miRNA. In some examples, the “framework” is derived from naturally occurring miRNAs, such as, for example, miR-155. The terms “5′ microRNA flanking sequence” and “5′ arm” are used interchangeably herein. The terms “3′ microRNA flanking sequence” and “3′ arm” are used interchangeably herein.

[0077] As used herein, the term “miRNA precursor” refers to an RNA molecule of any length which can be enzymatically processed into an miRNA, such as a primary RNA transcript, a pri-miRNA, or a pre-miRNA.

[0078] As used herein, the term “construct” refers to an isolated polypeptide or an isolated polynucleotide encoding a polypeptide. A polynucleotide construct can encode a polypeptide, for example, a lymphoproliferative element. A skilled artisan will understand whether a construct refers to an isolated polynucleotide or an isolated polypeptide depending on the context.

[0079] As used herein, “MOI”, refers to Multiplicity of Infection ratio where the MOI is equal to the ratio of the number of virus particles used for infection per number of cells. Functional titering of the number of virus particles can be performed using FACS and reporter expression, as non-limiting examples.

[0080] “Peripheral blood mononuclear cells” (PBMCs) include peripheral blood cells having a round nucleus and include lymphocytes (e.g., T cells, NK cells, and B cells) and monocytes. Some blood cell types that are not PBMCs include red blood cells, platelets and granulocytes (i.e., neutrophils, eosinophils, and basophils).

[0081] It is to be understood that the present disclosure and the aspects and embodiments provided herein, are not limited to particular examples disclosed, as such may, of course, vary. It is also to be understood that the terminology used herein is for the purpose of disclosing particular examples and embodiments only, and is not intended to be limiting, since the scope of the present disclosure will be limited only by the appended claims.

[0082] Where a range of values is provided, it is understood that each intervening value, to the tenth of the unit of the lower limit unless the context clearly dictates otherwise, between the upper and lower limit of that range and any other stated or intervening value in that stated range, is encompassed within the disclosure. The upper and lower limits of these smaller ranges may independently be included in the smaller ranges, and are also encompassed within the invention, subject to any specifically excluded limit in the stated range. Where the stated range includes one or both of the limits, ranges excluding either or both of those included limits are also included in the invention. When multiple low and multiple high values for ranges are given that overlap, a skilled artisan will recognize that a selected range will include a low value that is less than the high value. All headings in this specification are for the convenience of the reader and are not limiting.

[0083] Unless defined otherwise, all technical and scientific terms used herein have the same meaning as commonly understood by one of ordinary skill in the art to which this invention belongs. Although any methods and materials similar or equivalent to those described herein can also be used in the practice or testing of the present invention, the preferred methods and materials are now described. All publications mentioned herein are incorporated herein by reference to disclose and describe the methods and/or materials in connection with which the publications are cited.

[0084] It must be noted that as used herein and in the appended claims, the singular forms “a,” “an,” and “the” include plural referents unless the context clearly dictates otherwise. Thus, for example, reference to “a chimeric antigen receptor” includes a plurality of such chimeric antigen receptors and equivalents thereof known to those skilled in the art, and so forth. It is further noted that the claims may be drafted to exclude any optional element. As such, this statement is intended to serve as antecedent basis for use of such exclusive terminology as “solely,” “only” and the like in connection with the recitation of claim elements, or use of a “negative” limitation.

[0085] Unless specifically stated or otherwise obvious from context, as used herein, the term “or” is understood to be inclusive. The term “and/or” as used in a phrase such as “A and/or B” herein includes each of the following: A and B; A or B; A (alone); and B (alone). Similarly, the term “and/or” as used in a phrase such as “A, B, and/or C” includes each of the following: A, B, and C; A, B, or C; A or B; A or C; B or C; A and B; A and C; B and C; A (alone); B (alone); and C (alone). This logic extends to any number of items in a list that are connected with the term “and/or”.

[0086] It is appreciated that certain features of the invention, which are, for clarity, described in the context of separate embodiments, may also be provided in combination in a single embodiment. Conversely, various features of the invention, which are, for brevity, described in the context of a single embodiment, may also be provided separately or in any suitable sub-combination. All combinations of the embodiments pertaining to the invention are specifically embraced by the present invention and are disclosed herein just as if each and every combination was individually and explicitly disclosed. In addition, all sub-combinations of the various embodiments and elements thereof are also specifically embraced by the present invention and are disclosed herein just as if each and every such sub-combination was individually and explicitly disclosed herein.

### DETAILED DESCRIPTION

[0087] The present disclosure overcomes prior art challenges by providing improved methods and compositions for selectively killing or modulating the activity of modified cells, for example, modified NK cells and in illustrative embodiments, modified T cells, using anti-idiotype polypeptides expressed on the surface of the cells. For example, provided herein are anti-idiotype polypeptides that are improved cell therapy safety switches. One challenge with prior art safety switches that are eTags, is that they include EGFR family member domains, and thus are limited in structure to only EGFR domains. Furthermore, they may yield undesirable side effects when delivered to a subject since they are structurally related to a growth factor (e.g. EGFR) found in a subject. The anti-idiotype polypeptide safety switches provided herein, are much more robust and flexible safety switches than eTags in terms of design and development. Anti-idiotype polypeptide safety switch can be designed to be recognized by virtually any antibody, including any clinical antibody, such as a therapeutic antibody. Exemplary methods for developing anti-idiotype antibodies, which utilize phage display assays, are disclosed in the Examples section herein. Furthermore, the anti-idiotype polypeptides provided herein include designs that can be used to modulate cell activity, including, but not limited to, proliferation and apoptosis, and that do not require antibodies that drive cytotoxicity.

[0088] More specifically, some of the methods and compositions herein, provide versatile and effective solutions for controlling cytokine release syndrome in a subject with modified cells expressing a chimeric antigen receptor (CAR) or recombinant T cell receptor (TCR). Thus, the methods provide an important step toward improving the safety and effectiveness of cell therapy methods. Illustrative compositions for selectively killing of modified cells, for example, modified NK cells and in illustrative embodiments, modified T cells, are easier to develop and safer than existing compositions and methods. Some aspects of the anti-idiotype polypeptides provided herein, methods using the same, and polynucleotides encoding the same provide new methods and compositions to modulate the activity of the modified cells. Furthermore, compositions that have many uses, including their use in these improved methods, are provided, including cell formulation compositions. Some of these compositions include modified and in illustrative embodiments genetically modified lymphocytes that include safety switches for use with cellular therapies to affect the reduction or elimination of infused cells if dangerous adverse events develop. Other of these compositions have improved proliferative and survival qualities, including in in vitro culturing, for example in the absence of growth factors. Such modified and in illustrative embodiments genetically modified lymphocytes will have utility for example, as research tools to better understand mechanisms to control and stop cytokine release syndrome and the factors that influence T cell proliferation and survival, and for commercial production, for example for the production of certain factors, such as growth factors and immunomodulatory agents, that can be harvested and tested or used in commercial products. And such modified and genetically modified lymphocytes have utility in the treatment of cancer and other diseases.

### Anti-Idiotype Polypeptides

[0089] Provided herein are anti-idiotype polypeptides, and polynucleotides encoding these polypeptides (as disclosed in detail in other sections herein), that have numerous utilities in life sciences and medicine. Such polypeptides in illustrative embodiments are especially useful in modified cells, for example for use in cell and gene therapy. Anti-idiotype polypeptides expressed on the surface of cells can recognize target antibodies or target antibody mimetics that come in contact with these cells. These antibodies and antibody mimetics can be used to, for example mark cells expressing the anti-idiotype polypeptides for killing by the immune system, modulate a property (such as, for example, a proliferative state or an apoptotic state) or activity of the cells, label the cells, provide a target for enrichment and/or purification, enrich the cells, or cause the cells to aggregate. A person skilled in the art will understand how to use the anti-idiotype polypeptides for these and other methods in view of the present disclosure. Accordingly, provided herein are methods for providing any of the above-mentioned uses, by expressing any of the polynucleotides that are disclosed herein, that include nucleic acids encoding anti-idiotype polypeptides disclosed herein.

[0090] FIGS. 3 shows non-limiting exemplary embodiments of anti-idiotype polypeptides herein. As shown in FIG. 3A, anti-idiotype polypeptides herein, in illustrative aspects include an extracellular recognition domain (sometimes referred to as an anti-idiotype extracellular recognition domain, anti-id ERD, or anti-Id ECD and denoted in FIGS. 3A-F and FIG. 3H as “anti-idiotype”) and typically include a membrane association domain (MAD), which is separated from the anti-id ECD in illustrative embodiments, by a stalk. The anti-Id ERD in illustrative embodiments includes a recognition domain of an anti-idiotype antibody or anti-idiotype antibody mimetic. The recognition domain of an anti-idiotype polypeptide recognizes the idiotype of a target antibody or the idiotype of a target antibody mimetic. In illustrative embodiments, an anti-idiotype extracellular recognition domain includes an idiotype-binding variable region of an anti-idiotype antibody or anti-idiotype antibody mimetic. In illustrative embodiments, a stalk separates the MAD and the anti-idiotype extracellular recognition domain.

[0091] In some embodiments, an extracellular recognition domain recognizes the idiotype of any antibody or antibody mimetic known in the art. In certain illustrative embodiments, the extracellular recognition domain recognizes the idiotype of a clinical antibody or clinical antibody mimetic. Such a clinical antibody, in some illustrative embodiments, is a regulatory agency (e.g., U.S. FDA) approved biologic. In some embodiments, binding of the anti-idiotype polypeptide to the target antibody does not block or prevent binding between the target antibody and its cognate antigen. In illustrative embodiments, binding of the anti-idiotype polypeptide to the target antibody blocks or prevents binding between the target antibody and its cognate antigen.

[0092] Typically, anti-idiotype polypeptides include a membrane association domain (sometimes referred to herein as MAD). The membrane association domain of the anti-idiotype polypeptide attaches, tethers, or anchors the recognition domain from an anti-idiotype antibody or antibody mimetic to a cell membrane. In some embodiments, the membrane association domain comprises one or more of a transmembrane domain, and a GPI anchor, as further disclosed elsewhere herein. In some embodiments, the transmembrane domain can be a heterologous transmembrane domain, or an endogenous transmembrane domain, either of which could be the transmembrane domain of an antibody.

[0093] As shown in FIGS. 3B-G, in some embodiments, anti-idiotype polypeptides provided herein further include one or more intracellular domains (sometimes referred to herein as ICD). Furthermore, the MAD of such anti-idiotype polypeptides that include ICDs in certain illustrative embodiments, is a transmembrane domain (“TM” in FIGS. 3B-G). The one or more intracellular domains can activate or inhibit pro-apoptotic or anti-apoptotic pathways and/or pro-survival or anti-survival pathways, and in certain embodiments modulate other cellular processes/pathways. Details are provided throughout this specification regarding these various embodiments and other embodiments wherein an anti-idiotype polypeptide herein, includes an ICD. FIGS. 3B-G provides some non-limiting examples. In some embodiments, the ICD serves a structural role to assure the anti-id ERD is stably expressed on and remains bound to the cell membrane. In other embodiment an ICD can have functional properties that are regulated by binding dimerization or multimerization that is induced by binding of the anti-id ERD by its target antibody or antibody mimetic.

[0094] In some embodiments (FIG. 3C), the anti-id ERD (“anti-idiotype” in FIG. 3C) acts as an inducible extracellular dimerizing domain of an LE herein. In such embodiments, dimerization of an LE by binding of a target antibody to the anti-id ERD can activate signaling domains in the ICD, driving proliferation and/or cell survival. As illustrated, the ICD of an LE can include P3 and optionally P4 domains, as disclosed herein with respect to LE ICDs. In some embodiments, the intracellular domains can activate one or more of a Jak/Stat pathway, a TRAF pathway, a PI3K pathway, or a PLC pathway. Disclosure related to mechanisms for activating these pathways is provided in the “Lymphoproliferative section” herein. Illustrative examples of these embodiments are inducible chimeric lymphoproliferative elements, which are inducible upon binding of a target antibody to an extracellular domain that recognizes the idiotype of a target antibody.

[0095] In some embodiments (FIG. 3D), the anti-id ERD (“anti-idiotype” in FIG. 3D) acts as the ASTR of a CAR or TCR. Thus, the CAR or TCR includes the anti-id ERD, a stalk attaching the ERD to a transmembrane domain, and an ICD of a CAR or TCR. Thus, binding of a target antibody to the anti-id ERD can activate signaling domains in the ICD of the CAR or TCR.

[0096] In some embodiments, the intracellular domain is pro-apoptotic, and can include one or more intracellular signaling domains from a caspase protein and/or one or more intracellular signaling domains from tumor necrosis factor receptor superfamily members. As such, such embodiments are specific examples of safety switches provided herein. As illustrated in FIG. 3E, such embodiments can include an anti-idiotype polypeptide wherein the ICD includes a death domain. Such ICDs can include all or in certain illustrative embodiments, include a portion of an ICD from a TNF receptor superfamily member, that includes a death domain, such as FAS. Illustrative embodiments of such an ant-idiotype polypeptide includes a constitutive dimerization domain in the extracellular domain, that can be all or part of the stalk or transmembrane domain, thus providing such anti-idiotype polypeptide, the ability to form higher order multimers, such as tetramers.. Furthermore, ICDs for any embodiment illustrated in FIG. 3E can include death domains, or other functional domains from initiator caspases, such as for example, caspases 2, 8, 9, and 10.

[0097] In some embodiments (FIG. 3F), the anti-id ERD (“anti-idiotype” in FIG. 3D) acts as one of the ASTRs of a bi-specific CAR or TCR, wherein a second ASTR is present that typically binds to an antigen expressed by a cancer cell. Such embodiments can be called anti-idiotype bispecific CARs herein. In such embodiments, the CAR or TCR includes the anti-id ERD, a second ASTR, a stalk attaching the anti-id ERD and the 2^{nd} ASTR to a transmembrane domain, and an ICD of a CAR or TCR. Accordingly, binding of a target antibody to the anti-id ERD or binding of the 2^{nd} ASTR to its antigen, can activate signaling domains in the ICD of the CAR or TCR.

[0098] FIG. 3G illustrates another embodiment of anti-idiotype polypeptides herein that includes an ICD. In such embodiment, a cleavage site, typically that is activated by dimerization, is added to the anti-idiotype polypeptide between or as part of the transmembrane domain and the ICD. As such, in some embodiments these anti-idiotype polypeptides include a transmembrane domain that includes an amino acid sequence that serves as a substrate cleavage site upon dimerization, by certain proteases. Such cleavage site can be, in certain embodiments, a substrate cleavage site for gamma-secretase complex, as discussed in more detail herein. The intracellular domain for such embodiments can encode various intracellular polypeptides including certain caspases, including initiator caspases, for example caspases 2, 8, 9, and 10. In other embodiments, the ICD is a transcription factor. In such embodiments, the transcription factor is sequestered outside the nucleus until binding of the anti-id ERD by its target antibody inducing dimerization and cleavage, which releases the transcription factor such that it can enter the nucleus to become active in regulating gene expression.

### Anti-Idiotype Polynucleotides

[0099] Provided herein in one aspect, are polynucleotides that include nucleic acids that encode anti-idiotype polypeptides, which can be referred to herein as anti-idiotype polynucleotides. FIG. 1 provides a non-limiting exemplary polynucleotide that is a portion of a lentiviral vector, in this non-limiting example a third-generation lentiviral expression vector, that includes nucleic acids that encode an anti-idiotype polypeptide. The encoded anti-idiotype polypeptide includes an anti-idiotype extracellular recognition domain (“Anti-idiotype”), a stalk, and a membrane association domain (MAD). The non-limiting polynucleotide vector of FIG. 1 includes a promoter (“Promoter”) positioned to drive expression of nucleic acids encoding different functional polypeptides including the anti-idiotype polypeptide. Furthermore, the polynucleotide vector of FIG. 1 includes various functional domains as indicated, including various viral functional domains, and encodes an optional inhibitory RNA molecule within the promoter.

[0100] FIGS. 2 provides non-limiting examples of some polynucleotides provided herein, that include nucleic acids that encode one or more anti-idiotype polypeptides, which themselves represent separate aspects herein. As shown in FIG. 2A, nucleic acids that encode an anti-idiotype polypeptide, in some embodiments,encode a membrane association domain (MAD) and an anti-idiotype extracellular recognition domain (referred to as “anti-idiotype” in FIGS. 2). In illustrative embodiments, nucleic acids encoding a stalk separate and are in frame with nucleic acids encoding the MAD and nucleic acids encoding the anti-idiotype extracellular recognition domain. In some embodiments, provided herein are polynucleotides that encode additional functionalities, expressed from the same promoter (i.e., on the same transcription unit) or from different promoters (i.e. different transcriptional units). For example, polynucleotides that include nucleic acids that encode an anti-idiotype extracellular recognition domain, can include nucleic acids that encode, in addition to an anti-idiotype extracellular recognition domain, an engineered signaling polypeptide, a cytokine, and/or an inhibitory RNA. Thus, provided herein in one aspect is a polynucleotide, comprising: one or more transcriptional units, wherein each of the one or more transcriptional units is operatively linked to a promoter, wherein the one or more transcriptional units comprise:
[0101] a) a polynucleotide sequence encoding one or more inhibitory RNA molecules, a first engineered signaling polypeptide, and/or a cytokine, and
[0102] b) a polynucleotide sequence encoding an anti-idiotype polypeptide comprising an anti-idiotype extracellular recognition domain that recognizes an idiotype of a target antibody or a target antibody mimetic.

[0103] Polynucleotides that include nucleic acids that encode anti-idiotype polypeptides can be DNA or RNA. In some illustrative embodiments, they are mRNA. Such embodiments can include embodiments wherein the anti-idiotype antibody is directed against the antibody that forms the ASTR of a CAR. As such, mRNA that encode an anti-idiotype antibody can be directly delivered to a subject and when taken up and expressed by cells in the subject, such cells can form artificial antigen presenting cells that drive proliferation of CAR-T cells administered to the subject that express a CAR with an ASTR that is the target antibody recognized by the anti-idiotype polypeptide.

[0104] Methods for making synthetic mRNA are well known in the art. Furthermore, such polynucleotides can be polynucleotide vectors, such as expression vectors. Further details regarding polynucleotides and polynucleotide vectors, such as RIPs, including lentiviral particles, are provided throughout this disclosure, including the claims. These further details include details regarding polynucleotides that include nucleic acids encoding anti-idiotype polypeptides. Some non-limiting noteworthy sections include the Recombinant Retroviral Particles section, the Nucleic Acids section, and the Exemplary Embodiments section.

[0105] Nucleic acids encoding the anti-idiotype polypeptide can be upstream or downstream (i.e. 5′or 3′) from those encoding other functionalities. Thus, in such embodiments, anti-idiotype polynucleotides are expressed as a separate polypeptide from other functional polypeptides.

[0106] In certain illustrative embodiments, polynucleotides herein encode an anti-idiotype polypeptide and are adapted for, structured for, and/or effective for expression in T cells and/or NK cells, and thus for T cell and/or NK cell therapies. Examples of such polynucleotides typically include a promoter that is active in T cells and/or NK cells, that drives expression of the anti-idiotype extracellular recognition domain and a membrane association domain, which thus are on the same transcriptional unit whose expression is driven by the promoter. Accordingly, in some embodiments, an anti-idiotype polypeptide is expressed as part of a single polynucleotide that also encodes a chimeric antigen receptor (CAR), an engineered T cell receptor (TCR) (FIG. 2B), a lymphoproliferative element (FIG. 2C), or a cytokine (FIG. 2D). Furthermore, in some embodiments, an anti-idiotype polypeptide is expressed as part of a single polynucleotide that encodes a CAR or a TCR, an anti-idiotype polypeptide, and a lymphoproliferative element (FIG. 2E), or a cytokine (FIG. 2F), or both a lymphoproliferative element and a cytokine (FIG. 2G). Such polynucleotide embodiments and the anti-idiotype polypeptides they encode, especially for embodiments where both an anti-idiotype polypeptide and a CAR or TCR are encoded, when present and expressed in T cells and/or NK cells, are especially suited for, adapted for, and/or effective as safety switches as provided herein, including as part of CAR-T therapy, TIL therapy, and CAR-NK therapy, and other safety switch methods provided herein.

[0107] In some embodiments the polynucleotide encoding the anti-idiotype polypeptide is separated from the polynucleotide encoding the CAR, the TCR, the cytokine, and/or the polynucleotide encoding the lymphoproliferative element by an internal ribosome entry site (IRES) or a ribosomal skip sequence and/or cleavage signal (as shown, for example, in FIG. 2B-FIG. 2G). The IRES or ribosomal skip and/or cleavage signal can be any IRES or ribosomal skip sequence and/or cleavage signal known in the art. The ribosomal skip sequence can be, for example, T2A with amino acid sequence GSGEGRGSLLTCGDVEENPGP (SEQ ID NO:83). Other examples of cleavage signalsand/or ribosomal skip sequences include FMDV 2A (F2A); equine rhinitis A virus 2A (abbreviated as E2A); porcine teschovirus-1 2A (P2A); and Thoseaasigna virus 2A (T2A).

[0108] FIGS. 4 provides additional examples of anti-idiotype polynucleotides provided herein. For example, FIG. 4A illustrates a polynucleotide construct that includes nucleic acids encoding a bispecific CAR (i.e. a CAR with an anti-id ERD as one ASTR), followed by a nucleic acid T2A element, followed by nucleic acids encoding an LE. FIG. 4B illustrates a polynucleotide construct that includes nucleic acids encoding a CAR or TCR, followed by a nucleic acid T2A element, followed by nucleic acids encoding an anti-idiotype polypeptide that includes an anti-id ERD, a stalk, a transmembrane domain, and an intracellular domain. FIG. 4C illustrates a polynucleotide construct that includes nucleic acids encoding an anti-idiotype polypeptide that includes an anti-id ERD, a stalk, a transmembrane domain, and an intracellular domain, followed by a nucleic acid T2A element, followed by nucleic acids encoding an LE. FIG. 4D illustrates a polynucleotide construct that includes nucleic acids encoding an anti-idiotype polypeptide that includes an anti-id ERD, a stalk, a transmembrane domain, and an intracellular domain, followed by a nucleic acid T2A element, followed by nucleic acids encoding a cytokine. FIG. 4E illustrates a polynucleotide construct identical to FIG. 4B, but where the nucleic acids encoding the ICD of the anti-idiotype polypeptide are followed by a nucleic acid T2A element, which is followed by nucleic acids encoding an LE. FIG. 4F illustrates a polynucleotide construct identical to FIG. 4B, but where the nucleic acids encoding the LE are followed by a nucleic acid T2A element, which is followed by nucleic acids encoding a cytokine. FIG. 4G illustrates a polynucleotide construct identical to FIG. 4E, but where the nucleic acids encoding the ICD of the anti-idiotype polypeptide are followed by a nucleic acid T2A element, which is followed by nucleic acids encoding a cytokine.

[0109] Some non-limiting specific exemplary constructs, are the following:

[0110] F1-3-247 encoding a CD19 CAR and a polypeptide lymphoproliferative element comprised from amino to carboxy terminus of the Kozak-type sequence GCCGCCACCAT/UG(G) (SEQ ID NO:331), having the T at the “T/U” residue and having the optional last G, the CD8 signal peptide MALPVTALLLPLALLLHAARP (SEQ ID NO:72) (in which the sequence ATGG from the Kozak-type sequence also encodes the first four nucleotides of the CD8 signal peptide), a FLAG-TAG (DYKDDDDK; SEQ ID NO:74), a linker (GSTSGS; SEQ ID NO:349), an anti-CD19scFv, a CD8 stalk and transmembrane region, and an intracellular domain from CD3z followed by T2A and the lymphoproliferative element comprising the parts E006-T016-S186-S050 which encode an extracellular domain containing a variant of c-Jun including a leucine zipper motif and an eTag, the transmembrane domain of CSF2RA, the intracellular domain of MPL, and the intracellular domain of CD40 with each part of the lymphoproliferative element connected by a GGS linker.

[0111] F1-3-P100 encoding a CD19 CAR and an anti-idiotype polypeptide with the P3 and P4 domains of an LE comprised, from amino to carboxy terminus, of the Kozak-type sequence GCCGCCACCAT/UG(G) (SEQ ID NO:331), having the T at the “T/U” residue and having the optional last G, the CD8 signal peptide MALPVTALLLPLALLLHAARP (SEQ ID NO:72) (in which the sequence ATGG from the Kozak-type sequence also encodes the first four nucleotides of the CD8 signal peptide), a FLAG-TAG (DYKDDDDK; SEQ ID NO:74), a linker (GSTSGS; SEQ ID NO:349), an anti-CD19scFv, a CD8 stalk and transmembrane region, and an intracellular domain from CD3z followed by T2A an anti-cetuximab scFv from the table shown in FIG. 8, a stalk, transmembrane and ICD (STMICD2, SEQ ID NO. 677) and the lymphoproliferative element parts S121-S105 which encode the intracellular domain of IL7Rα, and the intracellular domain of IL2Rβ connected by a GGS linker.

[0112] FIG. 5A shows a schematic of an illustrative bicistronic lentiviral genomic vector with divergent transcriptional units. A first transcriptional unit comprising a lymphoproliferative element that is also anti-idiotype polynucleotide, followed by a polyadenylation sequence (PolyA) under the transcriptional control of an NFAT-responsive minimal IL-2 promoter (6x NFAT) is encoded in the reverse orientation. Optionally, an insulator element (Ins) separates the first and second transcriptional units. The second transcriptional unit encodes a CAR (CAR) under the transcriptional control of a constitutive promoter (Promoter) and is encoded in the forward orientation. Triangles shown in dashed lines represent 3 possible locations into any one or more of which, one or more miRNAs could optionally be inserted into the vector. The triangle shown in a dotted line represents 1 possible location in an exon within a promoter such as for EF1-α into which one or more inhibitory RNAs could optionally be inserted into the vector. “SA” and “SD” correspond to splice donor and splice acceptor sites.

[0113] FIG. 5B shows a schematic of an illustrative bicistronic lentiviral genomic vector with divergent transcriptional units. A first transcriptional encoding a lymphoproliferative element followed by a polyadenylation sequence (PolyA) under the transcriptional control of an NFAT-responsive minimal IL-2 promoter (6x NFAT) is encoded in the reverse orientation. Optionally, an insulator element (Ins) separates the first and second transcriptional units. The second transcriptional unit encodes a CAR (CAR) followed by a T2A element and an anti-idiotype extracellular recognition domain, a stalk, and a MAD under the transcriptional control of a constitutive promoter (Promoter) and is encoded in the forward orientation. Triangles shown in dashed lines represent 3 possible locations into any one or more of which, one or more miRNAs could optionally be inserted into the vector. The triangle shown in a dotted line represents 1 possible location in an exon within a promoter such as for EF1-α into which one or more inhibitory RNAs could optionally be inserted into the vector. “SA” and “SD” correspond to splice donor and splice acceptor sites. The ECD of the lymphoproliferative element in this design optionally comprises an eTAG or second anti-idiotype extracellular recognition domain.F1-6-744 encodes a bicistronic lentiviral genomic vector with divergent transcriptional units. The first transcriptional unit encodes the lymphoproliferative element E016-T016-S186-S050 under the control of an NFAT-responsive minimal IL-2 promoter all encoded in the reverse orientation. The second transcriptional unit encodes a HER2 CAR comprised of an anti-HER2scFv, a CD8 stalk and transmembrane region, a CD137 intracellular domain, and an intracellular activating domain from CD3z followed by T2A and an eTag. The first and second transcriptional units are separated by the 250 cHS4 insulator (SEQ ID NO:358) in the forward orientation.

### Cells Expressing Anti-Idiotype Polypeptides

[0114] In some aspects, provided herein are modified cells, and in illustrative embodiments genetically modified cells that include any of the anti-idiotype polynucleotides provided herein. Furthermore, modified cells, or in illustrative embodiments genetically modified cells are provided herein, that expresses any of the anti-idiotype polypeptides provided herein. In some embodiments, the modified or genetically modified cells can further express inhibitory RNA molecules and/or other polypeptides disclosed herein, for example, an engineered signaling polypeptide. In illustrative embodiments, the modified or genetically modified cells can express an anti-idiotype polypeptide and a lymphoproliferative element, CAR, and/or recombinant TCR. In illustrative embodiments, the modified or genetically modified cells can express an anti-idiotype polypeptide and a cytokine. In some embodiments the cytokine is in a secreted form. In some embodiments, the cytokine is membrane-associated. In some embodiments, the cell is an immortalized cell.

[0115] In some embodiments, the cells expressing an anti-idiotype polypeptide are lymphocytes, such as TILs, lymphocytes other than B cells, and in illustrative embodiments, T cells and/or NK cells. In some embodiments, the cells express a chimeric TCR or the cells are CAR-T cells and/or CAR-NK cells, or tumor infiltrating lymphocytes. In some embodiments of any of the aspects herein, the T or NK cells are NKT cells. NKT cells are a subset of T cells that express CD3 and typically co-express an αβ T-cell receptor, but also express a variety of molecular markers that are typically associated with NK cells (such as NK1.1 or CD56). In some embodiments, the cells are primary cells. In some embodiments, the cells are human cells. In some embodiments, the cells do not ordinarily produce antibodies. A skilled artisan will understand that reference to a lymphocyte that does not express an antibody in the context of a modified cell that includes or expresses an anti-idiotype polypeptide herein, refers to the native capability of the cell, and that such a modified cell includes, and in illustrative embodiments expresses, an anti-idiotype polypeptide.

[0116] In some embodiments the modified cells that have polynucleotides that include nucleic acids that encode an anti-idiotype polypeptide, are present in a cell suspension within a commercial container, such as a commercial container suitable for cell therapy, such as a cell cryopreservation infusion bag. The number of cells in the suspension within the commercial container can be sufficient to provide between 1 × 10⁵ cells and 1 × 10⁹, between 1 × 10⁻⁶ cells and 1 × 10⁹, or between 1 × 10⁻⁶ cells and 5 × 10⁸, for example CAR-positive viable T cells and/or NK cells per kg of body weight of the subject to which the cells are to be delivered. Accordingly, in some embodiments the commercial container, can include the aforementioned ranges × 50-150 kg, or 50-100 kg. In some embodiments, the commercial container includes between 1 × 10⁷ and 1 × 10¹¹ cells, between 1 × 10⁸ and 1 × 10¹¹ cells, or between 1 × 10⁸ and 5 × 10¹⁰ cells, modified cells, for example CAR-positive viable T cells and/or NK cells, and/or in an illustrative embodiment, cells that are positive for an anti-idiotype extracellular recognition domain. As such, anti-idiotype polypeptides herein, can be used to confirm that modified cells that express a CAR, also express the anti-idiotype polypeptide, for example as a release criteria to help assure that the safety switch is present on such cells. Further details regarding modified cells herein, in commercial containers, can be found herein, for non-limiting example, within the “KITS AND COMMERCIAL PRODUCTS” section.

[0117] In one aspect, provided herein is a modified or genetically modified T cell or NK cell made using a method according to any of the methods provided herein, wherein the cell is modified to contain a polynucleotide that includes nucleic acids that encode an anti-idiotype polypeptide. In some embodiments, the T cell or NK cell has been further modified to express a first engineered signaling polypeptide. In illustrative embodiments, the first engineered signaling polypeptide can be an LE, a TCR, or a CAR that includes an antigen-specific targeting region (ASTR), a transmembrane domain, and an intracellular activating domain. In some embodiments, the T cell or NK cell can further include a second engineered signaling polypeptide that can be a CAR, a TCR, or a lymphoproliferative element. In some embodiments, the lymphoproliferative element can be a chimeric lymphoproliferative element. In some embodiments, the T cell or NK cell can further include a pseudotyping element on a surface. In some embodiments, the T cell or NK cell can further include an activation element on a surface. The CAR, lymphoproliferative element, pseudotyping element, and activation element of the genetically modified T cell or NK cell can include any of the aspects, embodiments, or sub-embodiments disclosed herein. In illustrative embodiments, the activation element can be anti-CD3 antibody, such as an anti-CD3 scFvFc or an anti-CD3 antibody mimetic.

[0118] In some aspects, provided herein are aspects that include a genetically modified and/or transduced T cell or NK cell that include a polynucleotide encoding both an anti-idiotype polypeptide and a self-driving CAR. Details regarding such genetically modified and/or transduced T cells or NK cells, and composition and method aspects including a self-driving CAR, that contain such polynucleotides are disclosed in more detail herein.

[0119] In some embodiments, provided herein are genetically modified lymphocytes, in illustrative embodiments TILs, T cells and/or NK cells, or self-driving CAR aspects provided herein, that relate to either aspects for transduction of T cells and/or NK cells in blood or a component thereof, that include transcription units that encode one, two, or more (e.g., 1-10, 2-10, 4-10, 1-6, 2-6, 3-6, 4-6, 1-4, 2-4, 3-4) inhibitory RNA molecules. In some embodiments, such inhibitory RNA molecules are lymphoproliferative elements and therefore, can be included in any aspect or embodiment disclosed herein as the lymphoproliferative element as long as they induce proliferation of a T cell and/or an NK cell, or otherwise meet a test for a lymphoproliferative element provided herein. In some embodiments, inhibitory RNA molecules directed against any of the targets identified in the Inhibitory RNA Molecules section herein.

[0120] In some embodiments of the aspect immediately above where the T cell or NK cell comprises one or more (e.g., two or more) inhibitory RNA molecules and the CAR, or nucleic acids encoding the same, the ASTR of the CAR is an MRB ASTR and/or the ASTR of the CAR binds to a tumor associated antigen. Furthermore, in some embodiments of the above aspect, the first nucleic acid sequence is operably linked to a riboswitch, which for example is capable of binding a nucleoside analog, and in illustrative embodiments is an antiviral drug such as acyclovir.

[0121] In the methods and compositions disclosed herein, expression of engineered signaling polypeptides is regulated by a control element, and in some embodiments, the control element is a polynucleotide comprising a riboswitch. In certain embodiments, the riboswitch is capable of binding a nucleoside analog and when the nucleoside analog is present, one or both of the engineered signaling polypeptides are expressed. A cell of the current disclosure, for example a lymphocyte, such as a primary cell, and/or a lymphocyte that does not naturally produce antibodies, and in illustrative embodiments, a T cell and/or NK cell, can include more than one type of anti-idiotype polypeptide on its surface, i.e., anti-idiotype polypeptides with different extracellular recognition domains. Thus, in some embodiments, a cell can include a first anti-idiotype polypeptide on its surface that recognizes a first target antibody or antibody mimetic and elicits a first response upon binding, and a second anti-idiotype polypeptide on its surface that recognizes a second target antibody or antibody mimetic and elicits a second response upon binding. For example, addition of the first target antibody or antibody mimetic could activate pro-survival signals in the cell expressing the first anti-idiotype polypeptide through the intracellular domain of the first anti-idiotype polypeptide, and addition of the second target antibody or antibody mimetic could induce ADCC through the antibody or antibody mimetic effector functions. Thus, in some embodiments, a polynucleotide encodes one, two, three, or four, or more anti-idiotype polypeptides. In some embodiments, a cell contains such a polynucleotide, and expresses the one, two, three, or four, or more encoded anti-idiotype polypeptides. A skilled artisan will understand how to combine different anti-idiotype polypeptides to obtain different desired responses.

### Safety Switches

[0122] Safety switches have been developed for use with cellular therapies to affect the reduction or elimination of infused cells in the case of adverse events. Any of the replication incompetent recombinant retroviral particles provided herein can include nucleic acids that encode a safety switch as part of, or separate from, nucleic acids encoding any of the engineered signaling polypeptides provided herein. Thus, any of the engineered signaling polypeptides provided herein, for example engineered signaling polypeptides in modified, genetically modified, and/or transduced lymphocytes to be introduced or reintroduced into a subject, can include a safety switch. Thus, any of the engineered T cells disclosed herein can include a safety switch. Safety switch technologies can be broadly categorized into three groups based on their mechanism of action; antibody- or antibody mimetic-mediated cytotoxicity, pro-apoptotic signaling, and metabolic (gene-directed enzyme prodrug therapy, GDEPT). Previously disclosed safety switches include cell surface molecules that are truncated tyrosine kinase receptors. In some of these examples, the truncated tyrosine kinase receptor is a member of the epidermal growth factor receptor (EGFR) family (e.g., ErbB1 (HER1), ErbB2, ErbB3, and ErbB4), for example as disclosed in U.S. Pat. 8,802,374 or WO2018226897. Thus, some of these prior safety switches were polypeptides that are recognized by an antibody that recognizes the extracellular domain of an EGFR member. For example, SEQ ID NO:82, is an exemplary polypeptide that is recognized by, and under the appropriate conditions bound by an antibody that recognizes the extracellular domain of an EGFR member. Such truncated EGFR polypeptides are sometimes referred to herein as eTags. In illustrative embodiments, eTags are recognized by monoclonal antibodies that are commercially available such as matuzumab, necitumumab panitumumab, and in illustrative embodiments, cetuximab. For example, eTag was demonstrated to have a cell killing potential through Erbitux® mediated antibody dependent cellular cytotoxicity (ADCC) pathways. The inventors of the present disclosure have successfully expressed eTag in PBMCs using lentiviral vectors, and have found that expression of eTag in vitro by PBMCs exposed to Cetuximab, provided an effective elimination mechanism for PBMCs. eTags can be used in some embodiments of the present disclosure, but in such embodiments, typically an anti-idiotype extracellular domain is present as well.

[0123] In some embodiments, the extracellular recognition domain (i.e. cell tag) is itself an antibody, which as disclosed herein includes a functional antibody fragment, that binds a predetermined binding partner antibody (e.g. a target antibody). In illustrative embodiments, the cell tag antibody is specific for the target antibody, and for example, does not bind antibody constant regions exclusively, or in some embodiments, at all, or in illustrative embodiments, unless they interact with the target antibody (Ab1) to cell tag (extracellular recognition domain) (Ab2) binding. In illustrative embodiments, the cell tag antibody (i.e. extracellular recognition domain that includes the variable region of an antibody) is an anti-idiotypic antibody or antibody mimetic. In some embodiments, the anti-idiotypic antibody (Ab2) recognizes an epitope on the predetermined binding partner antibody (i.e. target antibody) (Ab1) that is distinct from the antigen binding site on Ab1. In illustrative embodiments, Ab2 binds the variable region of Ab1. In other illustrative embodiments, Ab2 binds the antigen-binding site of Ab1, and in illustrative embodiments, competes with Ab1 for binding to the antigen-binding site of Ab1. In certain embodiments, Ab2 may be from any animal including human and murine, or humanized or a chimeric antibody or an antibody derivative included within the definition of “antibody” herein, including, for example antibody fragments (Fab, Fab′, F(ab′)2, scFv, diabodies, bispecific antibodies, and antibody fusion proteins. Ab2 is typically associated with a membrane through a membrane association domain. In certain embodiments, Ab2 is associated with the cell surface via its endogenous transmembrane domain. In other embodiments, Ab2 is associated with the cell surface via a heterologous transmembrane domain or membrane attachment sequence such as GPI. In some embodiments, Ab1 is a commercially available monoclonal antibody. In illustrative embodiments, Ab1 is a commercially available monoclonal antibody therapeutic. In further illustrative embodiments, Ab1 is capable of mediating ADCC and/or CDC as described below. An example of a binding pair comprising an anti-idiotypic antibody (and methods of making the same) displayed on a cell line and cognate monoclonal Ab2 antibodies that mediate ADCC and CDC, is provided in WO2013188864.

[0124] In some embodiments, safety switches can also function as flags that label or mark polynucleotides, polypeptides, or cells as being engineered. Such safety switches can be detected using standard laboratory techniques including PCR, Southern Blots, RT-PCR, Northern Blots, Western Blots, histology, and flow cytometry. For example, detection of eTAG by flow cytometry has been used by at least one of the inventors as an in vivo tracking marker for T cell engraftment in mice. In other embodiments, cell tags are used to enrich for engineered cells using antibodies or ligands optionally bound to a solid substrate such as a column or beads. For example, others have shown that application of biotinylated-cetuximab to immunomagnetic selection in combination with anti-biotin microbeads successfully enriches T cells that have been lentivirally transduced with eTAG containing constructs from as low as 2% of the population to greater than 90% purity without observable toxicity to the cell preparation.

[0125] In some embodiments provided herein, the anti-idiotype polypeptide is a safety switch (also called a safety switch polypeptide or an anti-idiotype polypeptide safety switch herein) comprising a recognition domain of an anti-idiotype antibody or anti-idiotype antibody mimetic and a membrane association domain. Such safety switch polypeptides can be designed much more efficiently and with many more optional sequences and designs, than prior art safety switches. Such a safety switch polypeptide in one aspect, is designed such that the extracellular recognition domain recognizes an idiotype of an antibody or antibody mimetic capable of inducing cytotoxicity.

[0126] Thus, in one aspect the safety switch is based on antibody mediated cytotoxicity upon antibody or antibody mimetic binding to an anti-idiotype polypeptide expressed on the surface of a cell, and more specifically binding to an extracellular recognition domain (also referred to herein as a cell tag or more specifically, an anti-idiotype cell tag) of an anti-idiotype polypeptide. In some embodiments, the antibody or antibody mimetic binds to the cell tag and induces complement-dependent cytotoxicity (CDC) and/or antibody-dependent cell-mediated cytotoxicity (ADCC). In some embodiments, binding of the antibody or antibody mimetic to the anti-idiotype polypeptide induces, promotes, and/or activates one or more of ADCC, CDC, antibody-mediated complement activation, antibody-dependent cellular phagocytosis, and antibody-dependent enhancement of diseases. Details related to other antibody and antibody mimetic functions, including corresponding Fc domains for eliciting such responses, are discussed in the “Antibody and antibody mimetic effector functions” herein. The anti-idiotype polypeptide can be immunogenic, to further stimulate the immune system. Thus, in some embodiments, the cell tag is immunogenic. In other embodiments, the cell tag polypeptide is non-immunogenic.In another aspect, a safety switch polypeptide is designed such that the anti-idiotype polypeptide includes an intracellular domain having one or more cell-death inducing signals, and the polypeptide is capable of inducing a cell death signal upon binding of the anti-idiotype polypeptide to a target antibody or antibody mimetic that comprises the idiotype recognized by the anti-idiotype polypeptide. The cell-death inducing signals can be induced based on dimerization-induced apoptotic signaling. In some embodiments, the safety switch is based on dimerization induced apoptotic signals. In some embodiments, such a safety switch comprises an extracellular dimerization domain comprising a recognition domain of an anti-idiotype antibody or antibody mimetic linked in frame with a membrane association domain and an intracellular domain comprising components of an apoptotic pathway. Thus, dimerization mediated by the binding of an antibody or antibody mimetic to the anti-idiotype polypeptide results in apoptosis of the cell. In some embodiments, the safety switch includes inducible FAS (iFAS) comprised of one or more inducible dimerization domains, i.e., the anti-idiotype polypeptides, fused to the cytoplasmic tail of the Fas receptor and localized to the membrane by a membrane association domain. As discussed in the “Intracellular domains” section herein, in some embodiments, the safety switch includes one or more domains from a Caspase, such as caspase-1 or caspase-9.

[0127] As discussed in the “Anti-idiotype fusion polypeptides” section herein, the anti-idiotype polypeptides, including the safety switches discussed in this section, can be expressed as fusions with other polypeptides disclosed herein, including a lymphoproliferative element, a CAR, and/or a recombinant TCR. In other embodiments, the anti-idiotype polypeptides are expressed as polypeptides by themselves. In any of these embodiments, the anti-idiotype polypeptides can include any of the domains disclosed herein to be included in a lymphoproliferative element, CAR, and/or TCR, such as the extracellular domains, stalks, transmembrane domains, intracellular activating domains, modulatory domains, linkers, or intracellular domains.

### Anti-Idiotype Methods

[0128] The anti-idiotype compositions provided herein have many uses, including in in vitro and in vivo methods for cell tagging for example, and in illustrative embodiments, in methods of delivering polynucleotides or polynucleotide vectors (e.g., RIPs) and/or modified cells to a subject. Such methods for delivering polynucleotides, polynucleotide vectors and/or modified cells to a subject can for example, utilize signaling that is regulated by binding of a target antibody to an anti-idiotype extracellular recognition domain of an anti-idiotype polypeptide provided herein. Such a method can be a method for inducing target cell proliferation or death, wherein the target cells are the modified cells that are delivered, or are cells present in the subject that are modified in vivo in the subject by transduction, transfection, electroporation, or other means of gene delivery, with polynucleotides or polynucleotide vectors encoding anti-idiotype polynucleotides that are directly delivered in some embodiments. Target cell proliferation or death in illustrative embodiments, is induced by binding of a target antibody to an anti-idiotype extracellular recognition domain expressed on the target cell.

[0129] Thus, in one aspect, provided herein is a method for administering modified cells and/or polynucleotides, such as polynucleotide vectors, that include nucleic acids that encode an anti-idiotype polypeptide to a mammalian subject. The method of this aspect includes delivering the polynucleotides, such as polynucleotide vectors and/or modified cells to the mammalian subject. The polynucleotides or polynucleotide vectors can be any of the polynucleotide vectors provided herein that comprise nucleic acids encoding an anti-idiotype polypeptide provided herein. Such anti-idiotype polypeptides in certain embodiments include a membrane association domain, which in illustrative embodiments is separated from the anti-idiotype extracellular recognition domain on the anti-idiotype polypeptide, by a stalk. In some embodiments the anti-idiotype polypeptide includes an intracellular domain, which in some embodiments is an intracellular signaling domain. The modified cells can be any of the modified cells provided herein that comprise, and in illustrative embodiments express, any of the polynucleotides provided herein that comprise nucleic acids that encode an anti-idiotype polypeptide.

[0130] In illustrative embodiments, the modified cells are genetically modified cells. Such modified cells, or genetically modified cells, in some non-limiting embodiments are lymphocytes or lymphocytes other than B cells, and in some embodiments T cells and/or NK cells, such as CAR-T cells and/or CAR-NK cells. In certain embodiments, the polynucleotides are RNA or DNA, and in illustrative embodiments are mRNA, for example a synthetic anti-idiotype mRNA as disclosed herein. In illustrative embodiments, the polynucleotide vectors are replication incompetent retroviral particles (RIPs), for example recombinant lentiviral particles.

[0131] Systems and methods for processing cells that are removed from the subject, such as methods for isolating and modifying blood cells, for example PBMCs, can include traditional closed cell processing systems and methods, or “more recent” methods and systems as disclosed in further detail herein. Accordingly, provided herein in certain aspects, in addition to a method for administering modified cells, or as a part of or in combination with such a method (usually before the delivery step of such method for administering), is a method of transducing, modifying, and/or genetically modifying, peripheral blood mononuclear cells (PBMCs), or lymphocytes, typically T cells and/or NK cells, and in certain illustrative embodiments resting T cells and/or resting NK cells, in illustrative embodiments with polynucleotides that include nucleic acids encoding anti-idiotype polypeptides, in a reaction mixture. Such methods can include a contacting step that includes contacting lymphocytes with polynucleotide vectors, such as, but not limited to, replication incompetent recombinant retroviral particles (RIPs) in the reaction mixture, that include nucleic acids that encode an anti-idiotype polypeptide. Such reaction mixture, themselves represent separate aspects provided herein. In some embodiments, the reaction mixture comprises blood, or a component thereof, and/or an anticoagulant. The reaction mixture in illustrative embodiments comprises lymphocytes and identical copies of polynucleotide vectors, such as a replication incompetent recombinant retroviral particles, that comprise nucleic acids that encode an anti-idiotype polypeptide provided herein. Furthermore, the reaction mixture can include a T cell activation element. In certain embodiments, the reaction mixture includes one or more additional blood components set out below that in illustrative embodiments are present because the reaction mixture comprises at least 10% whole blood. In illustrative embodiments, the RIPs comprise a T cell binding polypeptide and a fusogenic polypeptide on their surface, which in illustrative embodiments is a pseudotyping element. In such methods, the contacting (and incubation under contacting conditions) facilitates association of the lymphocytes with the RIPs, wherein the RIPs genetically modify and/or transduce the lymphocytes. In certain illustrative embodiments that especially related to “more recent” methods for processing T cells, which can be performed in much shorter times, as discussed herein, the RIPs can further include a T cell activation element on their surface.

[0132] In some embodiments, the methods further include instructing a medical professional, patient or caregiver that a target antibody should be administered to the subject if life-threatening adverse events develop, and/or delivering a target antibody or antibody mimetic to the subject in response to life-threatening adverse events. Such adverse events include grade 3 and/or grade 4 adverse events, including grade 3 and/or grade 4 CRS or ICANS (Lee et al, “ASTCT Consensus Grading for Cytokine Release Syndrome and Neurologic Toxicity Associated with Immune Effector Cells”; Biology of Blood and Marrow Transplantation; 25: 6235-638 (2019)). The target antibody or antibody mimetic in illustrative embodiments, comprises an idiotype recognized by the anti-idiotype extracellular recognition domain. The target antibody or antibody mimetic can be any of the target antibodies and antibody mimetics disclosed herein, including, but not limited to, approved biologic target antibodies and antibody mimetics. The target antibody or antibody mimetic in some embodiments, is delivered in sufficient quantity to selectively kill at least 1%, 10%, 15%, 20%, 25%, 30%, 40%, 50%, 60%, 70%, 75%, 80%, 90%, 95%, or 99% of the genetically modified T cells and/or NK cells in the subject.

[0133] Methods for delivering modified cells, polynucleotides, polynucleotide vectors, and antibody or antibody mimetics to a subject are known in the art. In some embodiments of any of the aspects herein, delivery of the modified or genetically modified cells, polynucleotides or the polynucleotide vectors (e.g., RIPs), or the target antibody or antibody mimetic is performed by intravenous administration/infusion, intraperitoneal administration/injection, subcutaneous administration/injection, or intramuscular administration/injection. In some embodiments, the modified cells (e.g., lymphocytes) introduced into the subject are autologous cells, and in other embodiments they are allogeneic cells. In embodiments utilizing allogeneic cells, typically the cells (e.g., lymphocytes) are from a different person, and the cells (e.g., lymphocytes) from the subject are not modified. In some embodiments, no blood is collected from the subject to harvest cells during the method.

[0134] The present disclosure provides various treatment methods that involve delivery of an engineered T cell receptor or a CAR. An engineered T cell receptor or a CAR of the present disclosure, when present in a modified T lymphocyte or NK cell, or in a polynucleotide vector to be delivered directly to a subject, can mediate cytotoxicity toward a target cell. Such methods typically involve administration of modified lymphocytes, or substantially purified or purified polynucleotide vectors (e.g., RIRs) to a subject as provided herein. An engineered T cell receptor or CAR binds to an antigen present on a target cell, thereby mediating killing of a target cell by a T lymphocyte or an NK cell genetically modified to produce the engineered T cell receptor or CAR. In order to improve the effectiveness and/or the safety of such methods, in certain illustrative embodiments, modified T cells and/or NK cells, polynucleotides, or polynucleotide vectors that are delivered into a subject, are further modified such that they are capable of expressing, or express an anti-idiotype polypeptide and a CAR, a TCR, a cytokine, and/or a lymphoproliferative element as provided herein. In some embodiments, the modified cells express the anti-idiotype polypeptides and one or more of the CAR, the TCR, the cytokine, and/or the lymphoproliferative element from the same polynucleotide and sometimes on the same polypeptide, as disclosed herein. In illustrative embodiments, the modified cells are lymphocytes, in illustrative embodiments T cells and/or NK cells. In certain illustrative embodiment, such methods herein include delivery directly into a subject, of polynucleotides and polynucleotide vectors provided herein that include a promoter that is active in lymphocytes, in illustrative embodiments active in T cells and/or NK cells, and encode an anti-idiotype polypeptide.

[0135] Such methods that involve delivery of modified T cells and/or NK cells, or polynucleotide or polynucleotide vectors with promoters that are active in T cells and/or NK cells, are especially suited for, adapted for, and/or effective for methods in which the anti-idiotype polypeptides regulate T cell and/or NK cell proliferation (e.g., are useful as lymphoproliferative elements) and/or inducible cell killing (e.g., are useful as safety switches). Methods herein where anti-idiotype polypeptides are used to promote selective killing of modified cells, for example modified CAR-T, CAR-NK, or TIL cells, can be referred to herein as safety switch methods. In illustrative embodiments, such safety switch methods utilize any of the polynucleotides that include nucleic acids encoding anti-idiotype polynucleotides, and corresponding encoded and in illustrative embodiments, expressed, anti-idiotype polypeptides, provided herein. In some embodiments, such safety switch methods involve delivery of modified CAR-T cells, modified CAR-NK cells, or modified TIL cells to the subject, and can involve delivery of a target clinical antibody. Antibody delivery can be directed and administered to induce proliferation of the modified cells in the subject, and/or if the subject develops clinical symptoms that indicate that the modified cells that were delivered or cells derived therefrom, are causing adverse events in the subject, for example, grade 1 or grade 2 adverse events, and in some embodiments grade 3 and grade 4 adverse events, or otherwise putting the subject at risk of medical complications or even death. Thus, in some aspects, provided herein is a method, system, and kits, wherein the same anti-idiotype polypeptide, or polynucleotide, which typically for these embodiments includes an intracellular proliferation-inducing signaling domain, can be used to induce proliferation or killing, depending on whether the antibody that contacts a modified cell expressing the anti-idiotype polypeptide, has a structure to induce cell killing or only dimerization of anti-idiotype polypeptides. Typically, especially in safety switch methods, delivery of the target clinical antibody would be at a later date that is days, weeks, or months after the first or most recent delivery of the modified cells to the subject. In some embodiments, methods for administering a modified cell, such as a modified T cell and/or NK cell, can include receiving information regarding adverse events of a subject and/or testing a subject for adverse events, and instructing a medical professional, a patient, and/or a caregiver to administer a target antibody if a patient develops certain adverse events, and in some embodiments such target antibody is administered. For example, the instructions can specify to administer the target antibody if the patient develops certain grade 3 or grade 4 adverse events. Such adverse events can include, but are not limited to tumor lysis syndrome, cytokine release syndrome (CRS), macrophage activation syndrome, and/or neurotoxicity. In some embodiments herein, levels of interferon (IFN)-γ, IL-2, soluble IL-2Rα, IL-6, soluble IL-6R and granulocyte-macrophage colony-stimulating factor (GM-CSF), IL-1,IL-6, IL-8,IL-10,IL-12, tumor necrosis factor (TNF)-α, IFN-α, monocyte chemotactic protein (MCP)-1, macrophage inflammatory protein (MIP) 1α, can be detected and in illustrative embodiments measured to identified CRS. To detect neurotoxicity, some embodiments herein include detecting and/or receiving a report of decreased level of consciousness, confusion, seizures and cerebral edema.

[0136] A method of treating a disease or disorder in a subject having the disease or disorder, can include. contacting a polynucleotide vector, such as an expression vector, including nucleic acid sequences encoding an anti-idiotype polypeptide provided herein, with peripheral blood cells obtained from the subject to produce modified T cells and/or NK cells, such as modified cytotoxic T cells and/or NK cells, before administering the modified T cells and/or NK cells to the subject.

[0137] In some embodiments, methods provided herein, such as methods for delivering modified cells to a subject, which can be adoptive cell therapies, methods for producing persistent populations of cells, methods for delivering a formulation, etc. as non-limiting examples, are especially adopted for treating cancer. Such cancer can be any type of cancer. For example, such methods can be used for treating a subject who has, or a tumor associated with ovarian cancer, soft tissue sarcoma, peripheral T cell cancer, colorectal cancer, intrahepatic cholangiocarcinoma, glioblastoma, esophageal cancer, cutaneous T cell lymphoma, non-hodgkin lymphoma, urothelial cancer, basal cell carcinoma, epithelioid sarcoma, pancreatic cancer, non-small cell lung carcinoma, hodgkin lymphoma, renal cell carcinoma, mesothelioma, metastatic uveal melanoma, kidney cancer, blood cancer, HER2-expressing cancers, non-melanoma skin cancer, liposarcoma, hepatocellular carcinoma, small lymphocytic lymphoma, prostate cancer, breast cancer, anal cancer, marginal zone lymphoma, cutaneous squamous cell carcinoma, thyroid cancer, medullary thyroid cancer, triple-negative breast cancer, neuroendocrine prostate cancer, bladder cancer, paraganglioma, medulloblastoma, superficial basal cell carcinoma, head and neck squamous cell carcinoma, hematologic malignancies, melanoma, B-cell lymphoma, relapsed/refractory acute myeloid leukemia, angiosarcoma, bone sarcoma, refractory cervical cancer, cholangiocarcinoma, osteosarcoma, biliary tract cancer, castration-resistant prostate cancer, gastroesophageal adenocarcinomas, rhabdomyosarcoma, carcinoma, non-muscle invasive bladder cancer, uveal melanoma, small cell lung cancer, cervical cancer, primary open angle glaucoma, follicular lymphoma, synovial sarcoma, liver cancer, carcinosarcoma, leptomeningeal brain tumors, T-cell lymphoma, lymphoma, small cell lung cancer, mantle cell lymphoma, B-cell malignancies, endometrial cancer, myxoid/round cell liposarcoma, metastatic merkel cell carcinoma, neuroblastoma, chronic lymphocytic leukemia, tenosynovial giant cell tumors, sarcoma, acute myeloid leukemia, skin cancer, nasopharyngeal carcinoma, relapsed/refractory ewing sarcoma, bone cancer, glioma, salivary gland carcinoma, gastric cancer, benign tumor, low-grade serous ovarian cancer, metastatic breast cancer, multiple myeloma, diffuse large B cell lymphoma, relapsed/refractory lymphoma, metastatic colorectal cancer, advanced malignancies, acute lymphoblastic leukemia, mesothelin-expressing solid tumors.

[0138] In some embodiments, methods herein can be used to treat tumors that express any one or more of the tumor-associated antigens and/or tumor-specific antigens provided herein, and engineered T cell receptors and CARs can be designed to recognize such targets. As non-limiting examples, such tumor associated or tumor specific antigens include blood tumor antigens provided herein elsewhere in this specification, and in some non-limiting embodiments includes the following antigens, most or all of which are believed to be associated with solid tumors: AXL, CD44v6, CAIX, CEA, CD133, c-Met, EGFR, EGFRvIII, Epcam, EphA2, GD2, GPC3, GUCY2C, HER1, HER2, ICAM-1, IL13Rα2, IL11Ra, Kras, Kras G12D, L1CAM, MAGE, MET, Mesothelin, MUC1, MUC16 ecto, NKG2D, NY-ESO-1, PSCA, ROR-2, WT-1.

[0139] In some embodiments, any of the methods provided herein that involve an administering step, can be combined with administration of another cancer therapy, which in certain embodiments, can be a cancer vaccine, for example delivered subcutaneously. In other embodiments and optionally in further combination with cancer vaccine administration, such methods provided herein that include administering genetically modified T cells and/or NK cells into a subject, especially where the subject has, is afflicted with, or is suspected of having cancer, can further include delivering an effective dose of an immune checkpoint inhibitor to the subject. This checkpoint inhibitor delivery can occur before, after, or at the same time as administering the genetically modified T cells and/or NK cells. Immune checkpoint inhibitors are known and various compounds are approved and in clinical development. Check point molecules, many of which are the target of checkpoint inhibitor compounds, include, but not limited to an anti-PD1 antibody.

[0140] In some embodiments, the administering is for treating cancer in the subject, and wherein a tumor in the subject regresses within 60 days, 45 days, 30 days, or 14 days after said administering. In some embodiments, the tumor is a blood cancer, for example DLBCL, that in illustrative examples expresses any of the blood cancer antigens provided herein. In other embodiments, the tumor is a solid tumor that expresses a solid tumor antigen, which in certain illustrative embodiments is a HER2 positive solid tumor, such as, but not limited to, breast cancer. In some embodiments, the administering is for treating cancer in the subject, and wherein the subject experiences stable disease, at least a partial response, or a complete response, in illustrative embodiments by RECIST1.1 criteria, within 90 days, 75 days, 60 days, 45 days, 30 days, or 14 days after said administering. In some embodiments, the tumor shrinks by at least 10%, 20%, 25%, 30%, 50% or more. In some embodiments, a partial response occurs when the sum of tumor lesions reduces by 30% or more and is confirmed at least 4 weeks after the prior scan without the appearance of new lesions and/or any pathological lymph nodes have a reduction in short axis to less than 10 mm. In some embodiments, a complete response occurs when all target and non-target lesions disappear. In some embodiments, the administering is for treating cancer in the subject, and wherein the subject experiences at least a partial response or experiences a complete response within 60 days, 45 days, 30 days, or 14 days after said administering. In some embodiments, the subject is a human afflicted with cancer. In some embodiments, the cell formulation is administered 2, 3, 4, 5, 6, or more times, or in illustrative embodiments only once to the subject before stable disease, or in illustrative embodiments a partial response or a complete response is achieved. In some embodiments, a second formulation is administered to the subject at a second, third, fourth, etc. timepoint between 1 day and 1 month, 2 months, 3 months, 6 months, or 12 months after the administering a first cell formulation, wherein the second formulation can be identical to the first formulation, or can comprises any of the formulations provided herein.

[0141] In any of the aspects provided herein that include delivery of modified lymphocytes (e.g. modified T cells and/or NK cells), the method can be performed on a mammalian subject that has been subjected to a lymphodepletion process, as are known in the art. However, in illustrative embodiments, the administration of the modified T cells and/or NK cells, or RER retroviral particles (RIPs), is performed in a method that does not require lymphodepletion of the subject for successful engraftment in the subject and/or for successful reduction of tumor volume in the subject, or that is performed on a mammalian (e.g. human) subject that has not been subjected to lymphodepletion in the prior days, weeks, or months or ever before such administration (e.g. subcutaneous administration). In certain embodiments, the administration is performed on a mammalian (e.g. human) subject that is not suffering from a low white blood cell count, lymphopenia or lymphocytopenia. In certain embodiments, the subcutaneous administration is performed on a subject having a lymphocyte count in the normal range (i.e., 1,000 and 4,800 lymphocytes in 1 microliter (µL) of blood). In certain embodiments, the subcutaneous administration is performed on a subject having between 1,000 and 5,000, over 300, over 500, over 1,000, over 1,500, or over 2,000 lymphocytes per µL of blood). In certain embodiments, the subcutaneous administration is performed on a mammalian (e.g., human) subject that is lymphoreplete.

[0142] Further details regarding steps and systems for performing anti-idiotype methods can be found throughout this disclosure, included as a non-limiting example, the section entitled “STEPS AND

### Reaction Mixtures for Methods Herein″

### Target Antibodies and Antibody Mimetics

[0143] Anti-idiotype polypeptides of the current disclosure bind to the idiotype of target antibodies and/or target antibody mimetics. In some embodiments, the target antibody can include one or more domains from or derived from a a mouse antibody, a rat antibody, a rabbit antibody, a goat antibody, a chicken antibody, a sheep antibody, a cow antibody, a llama antibody, a chimeric antibody, or in illustrative embodiments, a human antibody. In some embodiments, different target antibodies or target antibody mimetics can be used to bind to the same anti-idiotype polypeptide to elicit different responses, for example a first target antibody to promote cell proliferation and/or survival and a second target antibody mimetic to promote cell death.

[0144] In some embodiments, the target antibody or antibody mimetic is a therapeutic antibody or a therapeutic antibody mimetic, respectively. In some embodiments, the target antibody or antibody mimetic can be a clinical antibody or clinical antibody mimetic, respectively. In some embodiments, the clinical antibody or clinical antibody mimetic is the subject of an FDA-approved Investigational New Drug Application (IND), or equivalent approved regulatory filing for initial clinical testing in humans in another country or jurisdiction. In some embodiments, the target antibody or the target antibody mimetic as per the Investigational New Drug Application or equivalent is a stand-alone product, with no other active therapeutic or ingredient being tested as part of the IND. In some illustrative embodiments, the clinical antibody or antibody mimetic is a regulatory agency (e.g., U.S. FDA) approved biologic. In some embodiments, the target antibody can be one or more of cetuximab, muromonab-CD3, efalizumab, tositumomab-i131, nebacumab, edrecolomab, catumaxomab, daclizumab, olaratumab, abciximab, rituximab, basiliximab, palivizumab, infliximab, trastuzumab, adalimumab, ibritumomab tiuxetan, omalizumab, bevacizumab, natalizumab, panitumumab, ranibizumab, eculizumab, certolizumab pegol, ustekinumab, canakinumab, golimumab, ofatumumab, tocilizumab, denosumab, belimumab, ipilimumab, brentuximab vedotin, pertuzumab, ado-trastuzumab emtansine, raxibacumab, obinutuzumab, siltuximab, ramucirumab, vedolizumab, nivolumab, pembrolizumab, blinatumomab, alemtuzumab, evolocumab, idarucizumab, necitumumab, dinutuximab, secukinumab, mepolizumab, alirocumab, daratumumab, elotuzumab, ixekizumab, reslizumab, bezlotoxumab, atezolizumab, obiltoxaximab, brodalumab, dupilumab, inotuzumab ozogamicin, guselkumab, sarilumab, avelumab, emicizumab, ocrelizumab, benralizumab, durvalumab, gemtuzumab ozogamicin, erenumab (erenumab-aooe), galcanezumab (galcanezumab-gnlm), burosumab (burosumab-twza), lanadelumab (lanadelumab-flyo), mogamulizumab (mogamulizumab-kpkc), tildrakizumab (tildrakizumab-asmn), fremanezumab (fremanezumab-vfrm), ravulizumab (ravulizumab-cwvz), cemiplimab (cemiplimab-rwlc), ibalizumab (ibalizumab-uiyk) emapalumab (emapalumab-lzsg), moxetumomab pasudotox (moxetumomab pasudotox-tdfk), caplacizumab (caplacizumab-yhdp), risankizumab (risankizumab-rzaa), polatuzumab vedotin (polatuzumab vedotin-piiq), romosozumab (romosozumab-aqqg), brolucizumab (brolucizumab-dbll), crizanlizumab (crizanlizumab-tmca), enfortumab vedotin (enfortumab vedotin-ejfv), [fam-]trastuzumab deruxtecan (fam-trastuzumab deruxtecan-nxki), teprotumumab (teprotumumab-trbw), eptinezumab (eptinezumab-jjmr), isatuximab (isatuximab-irfc), sacituzumab govitecan (sacituzumab govitecan-hziy), inebilizumab (inebilizumab-cdon), tafasitamab (tafasitamab-cxix), belantamab mafodotin (belantamab mafodotin-blmf), satralizumab (satralizumab-mwge), atoltivimab, maftivimab, odesivimab-ebgn, naxitamab-gqgk, margetuximab-cmkb, ansuvimab-zykl, evinacumab, dostarlimab (dostarlimab-gxly), loncastuximab tesirine (loncastuximab tesirine-lpyl), amivantamab (amivantamab-vmjw), aducanumab (aducanumab-avwa), tralokinumab, anifrolumab (anifrolumab-fnia), oportuzumab monatox, tisotumab vedotin, bimekizumab, narsoplimab, tezepelumab, sintilimab, inolimomb, balstilimab, ublituximab, toripalimab, omburtamab, penpulimab, tanezumab, faricimab, sutimlimab, teplizumab, and retifanlimab. In illustrative embodiments, binding of the anti-idiotype polypeptide to its target antibody or antibody mimetic prevents and/or blocks binding of the target antibody or antibody mimetic to the cognate antigen of the target antibody or antibody mimetic. In some embodiments, the extracellular recognition domain of the anti-idiotype polypeptide is capable of, adapted for, and/or configured to prevent and/or block binding of the target antibody or antibody mimetic to the cognate antigen of the target antibody or antibody mimetic when the anti-idiotype polypeptide is bound to the target antibody or antibody mimetic. In illustrative embodiments, the target antibody is cetuximab. In further illustrative embodiments, binding of the anti-idiotype polypeptide to cetuximab prevents and/or blocks binding of cetuximab to Epidermal Growth Factor Receptor (EGFR). In some embodiments, the extracellular recognition domain of the anti-idiotype polypeptide is capable of, adapted for, and/or configured to prevent and/or block binding of cetuximab to EGFR when the anti-idiotype polypeptide is bound to cetuximab.

[0145] In some embodiments, the clinical antibody or clinical antibody mimetic has been shown in one or more clinical trials to have an acceptable safety (i.e., adverse event) profile. In some embodiments, the clinical antibody or clinical antibody mimetic has passed human clinical safety testing in a stand-alone clinical trial of the clinical antibody or clinical antibody mimetic. In some embodiments, the clinical antibody or clinical antibody mimetic for which a stand-alone application for regulatory approval has been filed with the Food and Drug Administration of the U.S. (USFDA), European Medicines Agency (EMA), National Medical Products Administration of China (NMPA) (Chinese FDA), or the Pharmaceutical and Food Safety Bureau (PFSB) of Japan. In some embodiments, the clinical antibody or clinical antibody mimetic for which an application for approval (e.g., Biologic License Application (BLA)) has been filed with the Food and Drug Administration of the U.S. (USFDA), European Medicines Agency (EMA), National Medical Products Administration of China (NMPA) (Chinese FDA), or the Pharmaceutical and Food Safety Bureau (PFSB) of Japan. In some embodiments, the clinical antibody or clinical antibody mimetic is an approved biologic antibody or antibody mimetic, approved by the Food and Drug Administration of the U.S. (USFDA), European Medicines Agency (EMA), National Medical Products Administration of China (NMPA) (Chinese FDA), or the Pharmaceutical and Food Safety Bureau (PFSB) of Japan.

[0146] In some embodiments, the target antibody or antibody mimetic can be a bispecific antibody. In some embodiments, the target antibody or antibody mimetic can be a multispecific antibody. Multispecific antibodies have binding specificities for at least two different sites. In some embodiments, one of the binding specificities is for one target antigen and the other is for another target antigen. In some embodiments, bispecific antibodies or antibody mimetics may bind to two different epitopes of a target antigen. In some embodiments, one of the binding specificities is for one target antigen, which is not an antibody or antibody mimetic, and the other is for a second target antigen, which is an antibody or antibody mimetic.

[0147] In some embodiments, the target antibody or antibody mimetic recognized by an anti-idiotype polypeptide includes an Fc domain from IgM, IgD, IgG, IgA, or IgE. In some embodiments, the antibody or antibody mimetic recognized by an anti-idiotype polypeptide includes an Fc domain from IgM, IgD, IgG1, IgG2, IgG3, IgG4, IgA1, IgA2, or IgE. In some embodiments, a target antibody or antibody mimetic with an IgM Fc domain can be used to drive higher order multimerization.

[0148] In some embodiments, the target antibody or antibody mimetic includes glycosylated residues. In some embodiments, the target antibody or antibody mimetic includes an α-Gal epitope. In some embodiments, the target antibody or antibody mimetic includes one or more glycoforms. In some embodiments, the glycoforms or antibody mimetic includes the target antibody with an α-1,3-Gal residue. In some embodiments, the glycoforms comprise the target antibody with an N-glycolylneuraminic acid residue. In some embodiments, the glycoforms comprise the target antibody with an oligomannose.

[0149] The cell line an antibody or antibody mimetic is produced in can affect glycosylation of the residues in the polypeptide. In some embodiments, the target antibody or antibody mimetic can be produced in a CHO cell line, a BHK cell line, an NS0 cell line, an SP2/0 cell line, a YB2/0 cell line, or an HEK293 cell line or its derivatives (e.g., a HT-1080 cell line, a Huh-7 cell line, or a PER.C6 cell line). In illustrative embodiments, the target antibody or antibody mimetic can be produced in a CHO cell line. In other illustrative embodiments, the target antibody or antibody mimetic can be produced in an NS0 cell line. In other illustrative embodiments, the target antibody or antibody mimetic can be produced in an SP2/0 cell line.

[0150] In some embodiments, the anti-idiotype polypeptide recognizes a target antibody mimetic. In some embodiments, the target antibody mimetic can be an afflilin, an affimer, an affitin, an alphabody, an alphamab, an anticalin, a peptide aptamer, an armadillo repeat protein, an atrimer, an avimer (also known as avidity multimer), a C-type lectin domain, a cysteine-knot miniprotein, a cyclic peptide, a cytotoxic T-lymphocyte associated protein-4, a DARPin (Designed Ankyrin Repeat Protein), a fibrinogen domain, a fibronectin binding domain (FN3 domain) (e.g., adnectin or monobody), a fynomer, a knottin, a Kunitz domain peptide, a nanofitin, a leucine-rich repeat domain, a lipocalin domain, a mAb 2 or Fcab™, a nanobody, a nanoCLAMP, an OBody, a Pronectin, a single-chain TCR, a tetratricopeptide repeat domain, VHH, or a V-like domain. Antibody mimetic can include Fc domains to control the effect of binding of the anti-idiotype antibody mimetic to the target antibody mimetic, as discussed in the “Antibody and antibody mimetic effector functions” section.

### Antibody Variants

[0151] In any of the embodiments disclosed herein, the amino acids in the polypeptide sequences of the extracellular recognition domain of an anti-idiotype polypeptide or of the antibodies and antibody mimetics to which the anti-idiotype polypeptide binds can contain substitutions or variations. The anti-idiotype polypeptides, antibodies and antibody mimetics obtained by performing substitutions or variations in the amino acid sequences can be referred to as anti-idiotype polypeptide variants, antibody variants and antibody mimetic variants, respectively. In some embodiments, the antibodies and antibody mimetics to which the anti-idiotype polypeptide binds, can be antibody variants and antibody mimetic variants, respectively. Anti-idiotype polypeptide variants, antibody variants, and antibody mimetic variants can be prepared by introducing appropriate changes into the nucleotide sequence of the nucleic acids encoding the antibody or antibody mimetic. Alternatively, antibody variants and antibody mimetic variants can be prepared by peptide synthesis. Such modifications include, for example, deletions, insertions, and/or substitutions of residues within the amino acid sequences of the anti-idiotype polypeptide, antibody, or antibody mimetic. Any combination of deletion, insertion, and substitution can be made to generate the anti-idiotype polypeptide variant, antibody variant, or antibody mimetic variant, provided that the anti-idiotype polypeptide variant, antibody variant, or antibody mimetic variant possesses the desired characteristics, for example, idiotype or antigen binding. Not to be limited by theory, the variations can be introduced into the antibody in order to improve the binding affinity, and/or other biological properties of the antibody. In some embodiments, the variants include one or more amino acid substitutions.

[0152] In some embodiments, an alanine (Ala) residue can be substituted with valine (Val), leucine (Leu), or isoleucine (Ile). In some embodiments, an arginine (Arg) residue can be substituted with lysine (Lys), glutamine (Gln), or asparagine (Asn). In some embodiments, an asparagine (Asn) residue can be substituted with glutamine (Gln), histidine (His), aspartic acid (Asp), lysine (Lys), or arginine (Arg). In some embodiments, an aspartic acid (Asp) residue can be substituted with glutamic acid (Glu) or asparagine (Asn). In some embodiments, a cysteine (Cys) residue can be substituted with serine (Ser) or alanine (Ala). In some embodiments, a glutamine (Gln) residue can be substituted with asparagine (Asn) or glutamic acid (Glu). In some embodiments, a glutamic acid (Glu) residue can be substituted with aspartic acid (Asp) or glutamine (Gln). In some embodiments, a glycine (Gly) residue can be substituted with alanine (Ala). In some embodiments, a histidine (His) residue can be substituted with asparagine (Asn), glutamine (Gln), lysine (Lys), or arginine (Arg). In some embodiments, an isoleucine (Ile) residue can be substituted with leucine (Leu), valine (Val), methionine (Met), alanine (Ala), phenylalanine (Phe), or norleucine. In some embodiments, a leucine (Leu) residue can be substituted with norleucine, isoleucine (Ile), valine (Val), methionine (Met), alanine (Ala), or phenylalanine (Phe). In some embodiments, a lysine (Lys) residue can be substituted with arginine (Arg), glutamine (Gln), or asparagine (Asn). In some embodiments, a methionine (Met) residue can be substituted with leucine (Leu), phenylalanine (Phe), or isoleucine (Ile). In some embodiments, a phenylalanine (Phe) residue can be substituted with tryptophan (Trp), leucine (Leu), valine (Val), isoleucine (Ile), alanine (Ala), or tyrosine (Tyr). In some embodiments, a proline residue can be substituted with alanine (Ala). In some embodiments, a serine (Ser) residue can be substituted with threonine (Thr). In some embodiments, a threonine (Thr) residue can be substituted with valine (Val) or serine (Ser). In some embodiments, a tryptophan (Trp) can be substituted with tyrosine (Tyr) or phenylalanine (Phe). In some embodiments, a tyrosine (Tyr) residue can be substituted with tryptophan (Trp), phenylalanine (Phe), threonine (Thr), or serine (Ser). In some embodiments, a valine (Val) residue can be substituted with isoleucine (Ile), leucine (Leu), methionine (Met), phenylalanine (Phe), alanine (Ala), or norleucine.

[0153] As discussed elsewhere herein, the target antibody or antibody mimetic can include an Fc region. Not to be limited by theory, glycosylation of the Fc region of the target antibody or antibody mimetic can affect the antibody effector function. In some embodiments, the antibody or antibody mimetic including an Fc region can be altered by altering the carbohydrate attached to the Fc region. Native antibodies produced by mammalian cells typically include a branched, biantennary oligosaccharide that is typically attached by an N-linkage to Asn297 of the CH2 domain of the Fc region. The oligosaccharide may include various carbohydrates, e.g., mannose, N-acetyl glucosamine (GlcNAc), galactose, and sialic acid, as well as a fucose attached to a GlcNAc in the “stem” of the biantennary oligosaccharide structure. In some embodiments, modifications of the oligosaccharide in an antibody or antibody mimetic of the invention can be made to generate antibody or antibody mimetic variants with certain improved properties. In some embodiments, antibody or antibody mimetic variants include a carbohydrate structure that lacks fucose directly or indirectly attached to an Fc region. In some embodiments, the amount of fucose in the antibody or antibody mimetic variants may be from 1% to 80%, 1% to 65%, 5% to 65%, or 20% to 40%. The amount of fucose can be determined by calculating the average amount of fucose within the sugar chain at Asn 297, relative to the sum of all glycostructures attached to Asn 297 (e.g., complex, hybrid and high mannose structures) as measured by MALDI-TOF mass spectrometry, as described in WO2008/077546, for example. Asn297 refers to the asparagine residue located at about position 297 in the Fc region (Eu numbering of Fc region residues); however, Asn297 can also be located within about 3 amino acids upstream or downstream of position 297, i.e., between positions 294 and 300, due to minor sequence variations in antibodies. Such fucosylation variants may have improved ADCC function. See, for example, U.S. Pat. Publication Nos. US2003/0157108; US2004/0093621.

[0154] In some embodiments, the antibody or antibody mimetic variants can include bisected oligosaccharides in which a biantennary oligosaccharide attached to the Fc region of the antibody is bisected by N-acetylglucosamine (GlcNAc). The bisecting GlcNAc structure is a β1,4-linked GlcNAc attached to the core β-mannose residue, representing a special type of N-glycosylated modification. GlcNAc transferred to the 4-position of the β-linked core mannose (Man) residue in complex or hybrid N-glycans by the β1,4-mannosyl-glycoprotein 4-β-N-acetylglucosaminyltransferase (GlcNAc-T III) is considered as a bisecting structure that is usually not considered as an antenna because it cannot be further extended by the proper enzymes. Such antibody and antibody mimetic variants can have reduced fucosylation and/or improved ADCC antibody effector function.. In some embodiments, antibody or antibody mimetic variants can include at least one galactose residue in the oligosaccharide attached to the Fc region. Such antibody and antibody mimetic variants can have improved antibody-mediated complement function.. In some embodiments, the Fc region of an antibody or antibody mimetic can include modifications, e.g., substitutions, in one or more amino acids, thereby generating an Fc region variant. In some embodiments, the Fc region variant can include a human Fc region sequence (e.g., a human IgG1, IgG2, IgG3 or IgG4 Fc region). In some embodiments, an antibody or antibody mimetic variant includes an Fc region with one or more amino acid substitutions can have improved ADCC, e.g., substitutions at positions 298, 333, and/or 334 of the Fc region of SEQ ID NO:698 (Heavy chain of E27 Anti-IgE antibody). In some embodiments, an antibody or antibody mimetic variant includes a modification in the Fc region that results in altered (i.e., either improved or diminished) C1q binding and/or Complement Dependent Cytotoxicity (CDC).). In some embodiments, an antibody or antibody mimetic disclosed herein can be derivatized with non-proteinaceous moieties that are known in the art. In some embodiments, the non-proteinaceous moieties suitable for derivatization of the antibody or antibody mimetic include but are not limited to water-soluble polymers. Non-limiting examples of water-soluble polymers include, but are not limited to, polyethylene glycol (PEG), copolymers of ethylene glycol/propylene glycol, carboxymethylcellulose, dextran, polyvinyl alcohol, polyvinyl pyrrolidone, poly-1,3-dioxolane, poly-1,3,6-trioxane, ethylene/maleic anhydride copolymer, polyaminoacids (either homopolymers or random copolymers), and dextran or poly(n-vinyl pyrrolidone)polyethylene glycol, propropylene glycol homopolymers, prolypropylene oxide/ethylene oxide co-polymers, polyoxyethylated polyols (e.g., glycerol), and/or polyvinyl alcohol, and combinations thereof. The polymer can be of any molecular weight, and can be branched or unbranched. The number of polymers attached to the antibody can vary, and if more than one polymer is attached, they can be the same or different molecules. In general, the number and/or type of polymers used for derivatization can be determined based on considerations including, but not limited to, the particular properties or functions of the antibody or antibody mimetic to be improved, and whether the antibody or antibody mimetic derivative will be used in a therapy under defined conditions. The antibody- or antibody mimetic-polymer conjugates can be made using any suitable technique for derivatizing antibodies with polymers. In some embodiments, the antibody- and antibody mimetic-polymer conjugates as disclosed herein include species wherein a polymer is covalently attached to a specific site or specific sites on the parental antibody, i.e., polymer attachment is targeted to a particular region or a particular amino acid residue or residues in the parental antibody or antibody mimetic. Site specific conjugation of polymers can be performed by attachment to cysteine residues in the parental antibody or antibody mimetic. In such embodiments, the coupling chemistry can, for example, utilize the free sulfhydryl group of a cysteine residue not in a disulfide bridge in the parental antibody. The polymer can be activated with any functional group capable of reacting specifically with the free sulfhydryl or thiol group(s) on the parental antibody, such as maleimide, sulfhydryl, thiol, triflate, tesylate, aziridine, exirane, and 5-pyridyl functional groups. The polymer can be coupled to the parental antibody using any protocol suitable for the chemistry of the coupling system selected.. In some embodiments, one or more cysteine residues naturally present in the parental antibody or antibody mimetic are used as attachment sites for polymer conjugation. In another embodiment, one or more cysteine residues are engineered into a selected site or sites in the parental antibody or antibody mimetic for the purpose of providing a specific attachment site or sites for polymer. In some embodiments, antibody fragments, such as Fab, can be derivatized to form antibody fragment-polymer conjugates, and the polymer is attached to one or more cysteine residue in the light or heavy chain of the fragment that would ordinarily form the inter-chain disulfide bond linking the light and heavy chains.

[0155] A skilled artisan will understand that any of the embodiments disclosed herein that include antibodies and antibody mimetics can instead include the antibody variants and antibody mimetic variants, respectively, disclosed in this section.

### Antibody and Antibody Mimetic Effector Functions

[0156] The domains of the antibodies and/or antibody mimetics bound by the anti-idiotype polypeptides can control or modulate the downstream effects the anti-idiotype polypeptides have upon binding to their target antibodies or target antibody mimetics. Fc domains of an antibody can change the downstream effects of the antibody binding to an antigen. Thus, illustrative methods provided herein, that include contacting a cell expressing an anti-idiotype polypeptide with a target antibody comprising the idiotype, or delivering an antibody to a subject to effect such contacting, can utilize antibodies whose Fc domains are selected to provide a particular function. Not to be limited by theory, the Fc domain of the antibody can also affect the function of the antibody binding to the anti-idiotype polypeptide, also referred to herein as the antibody effector function. In some embodiments, the target antibody or antibody mimetic includes an Fc domain that is capable of cross-linking with the Fc receptors on an effector cell to initiate antibody-dependent cellular cytotoxicity (ADCC) leading to death of the cells that are bind the target antibody or antibody mimetic. In some embodiments, the effector cell may be one or more of NK cells, monocytes, macrophages, and granulocytes. The Fc domain variants include five isotypes, IgM, IgD, IgG, IgA, and IgE, each with unique structural features that impact the antibody function. The IgG isotype is further divided into four subclasses, i.e., IgG1, IgG2, IgG3, and IgG4, and the IgA isotype is further divided into two subclasses, i.e., IgA1 and IgA2. In some embodiments, the antibody recognized by an anti-idiotype polypeptide includes an Fc domain from IgM, IgD, IgG, IgA, or IgE. In some embodiments, the antibody recognized by an anti-idiotype polypeptide includes an Fc domain from IgM, IgD, IgG1, IgG2, IgG3, IgG4, IgA1, IgA2, or IgE. In some embodiments, the antibody recognized by an anti-idiotype polypeptide includes an Fc domain from IgG1, IgG2, IgG3, or IgG4. In some embodiments, the antibody recognized by an anti-idiotype polypeptide includes an Fc domain from IgA1 or IgA2. In some embodiments, the Fc domain of the antibody recognized by an anti-idiotype polypeptide is or is derived from the Fc domain of an antibody from any animal. In some embodiments, the Fc domain of the antibody recognized by an anti-idiotype polypeptide is or is derived from a rat, mouse, or in illustrative embodiments a human Fc domain and retains at least 85%, 90%, 95%, or 99% sequence identity. In some embodiments, the Fc domain of the antibody recognized by an anti-idiotype polypeptide can be chimeric IgG1, human IgG1, human IgG2, human IgG4, human IgM, humanized IgG1, humanized IgG2, humanized IgG2/4, humanized IgG4, mouse IgG1, or mouse IgG2a.

[0157] In some embodiments, the anti-idiotype polypeptide induces, promotes, or activates antibody effector functions upon antibody or antibody mimetic binding to the anti-idiotype extracellular recognition domain of the anti-idiotype polypeptide expressed on the surface of the cell. In some embodiments, binding of the antibody or antibody mimetic to the anti-idiotype polypeptide induces, promotes, or activates one or more of antibody-mediated complement activation, antibody-dependent cellular cytotoxicity (ADCC), complement-dependent cytotoxicity (CDC), antibody-dependent cellular phagocytosis, antibody-dependent enhancement of diseases, and opsonization. In some embodiments, binding of the antibody or antibody mimetic to the anti-idiotype polypeptide does not induce, promote, or activate ADCC. In some embodiments, the antibody includes an Fc domain derived from IgM, IgG, or IgA and binding of the anti-idiotype polypeptide to the antibody induces, promotes, or activates one or more of macrophage opsonophagocytosis, oxidative burst or release of cytokines, and antimicrobial peptides. In some embodiments, the antibody includes an Fc domain derived from IgM, IgG, or IgA and binding of the anti-idiotype polypeptide to the antibody induces, promotes, or activates one or more of antigen uptake, DC maturation, and antigen presentation. In some embodiments, the antibody includes an Fc domain derived from IgM, IgG, or IgA and binding of the anti-idiotype polypeptide to the antibody induces, promotes, or activates antigen capture on follicular dendritic cells for presentation to B cells. In some embodiments, the antibody includes an Fc domain derived from IgD, IgG, or IgE and binding of the anti-idiotype polypeptide to the antibody induces, promotes, or activates granulocyte degranulation and release of one or more of vasoactive mediators, chemoattractants and T_{H}2-type cytokines. In some embodiments, the antibody includes an Fc domain derived from IgM or IgG and binding of the anti-idiotype polypeptide to the antibody induces, promotes, or activates complement-mediated production of chemoattractants, cytotoxicity, and opsonophagocytosis. In some embodiments, the antibody includes an Fc domain derived from IgM or IgG and binding of the anti-idiotype polypeptide to the antibody induces, promotes, or activates one or more of neutrophil activation, opsonophagocytosis, oxidative burst, and induction of neutrophil extracellular traps. In some embodiments, the antibody includes an Fc domain derived from IgG and binding of the anti-idiotype polypeptide to the antibody induces, promotes, or activates one or more of NK cell degranulation and cytotoxicity.

### Anti-Idiotype Compositions

[0158] In one aspect, provided herein is an anti-idiotype polypeptide that includes an extracellular recognition domain and a membrane association domain, wherein the extracellular recognition domain comprises a domain that recognizes an idiotype of a target antibody or a target antibody mimetic.

[0159] Furthermore, provided herein in another aspect is a polynucleotide encoding the anti-idiotype polypeptide. For example, in one aspect provided herein is a polynucleotide that includes one or more transcriptional units, wherein each of the one or more transcriptional units is operatively linked to a promoter wherein the one or more transcriptional units comprise:
[0160] a) nucleic acids a polynucleotide sequence encoding one or more inhibitory RNA molecules and/or a first engineered signaling polypeptide, and
[0161] b) nucleic acids a polynucleotide sequence encoding an anti-idiotype polypeptide comprising an extracellular recognition domain and a membrane association domain, wherein the extracellular recognition domain comprises a domain that recognizes an idiotype of a target antibody or antibody mimetic.

[0162] In some embodiments, the anti-idiotype polypeptide further includes one or more of a stalk domain, an intracellular domain, and/or a linker. The anti-idiotype polypeptide can also be part a fusion polypeptide, as disclosed in more detail below. In such embodiments, the membrane association domain can be part of the polypeptide to which the anti-idiotype polypeptide is fused.

[0163] In some embodiments, the anti-idiotype polypeptide can be at least 10, 15, 20, 25, 30, 35, 40, 45, 50, 75, 100, 125, 150, 175, 200, 225, 250, 275, 300, 350, 400, 450, 500, 600, 700, 800, 900, or 1000 amino acids in length. In some embodiments, the anti-idiotype polypeptide can be between 10 and 1000, 10 and 900, 10 and 800, 10 and 700, 10 and 600, 10 and 500, 10 and 400, 10 and 300, 10 and 200, 10 and 100, 10 and 50, 25 and 1000, 25 and 900, 25 and 800, 25 and 700, 25 and 600, 25 and 500, 25 and 400, 25 and 300, 25 and 200, 25 and 100, 25 and 50, 50 and 1000, 50 and 900, 50 and 800, 50 and 700, 50 and 600, 50 and 500, 50 and 400, 50 and 300, 50 and 200, 50 and 100, 100 and 1000, 100 and 900, 100 and 800, 100 and 700, 100 and 600, 100 and 500, 100 and 400, 100 and 300, or 100 and 200 amino acids in length.

### Anti-Idiotype Extracellular Recognition Domain

[0164] The anti-idiotype extracellular recognition domain of an anti-idiotype polypeptide is typically all or more typically part of an anti-idiotype antibody or anti-idiotype antibody mimetic. The extracellular recognition domain of an anti-idiotype polypeptide is capable of, has a structure for, is designed to, is selected for, is effective for, and/or is adapted for, recognizing, binding to, or otherwise interacting with the idiotype of a target antibody or the idiotype of a target antibody mimetic. Thus, a recognition domain of an anti-idiotype antibody or antibody mimetic, and the target antibody or antibody mimetic that has the idiotype to which it binds, are specific binding pair members.

[0165] In some embodiments, an extracellular recognition domain of an anti-idiotype polypeptide recognizes the idiotype of any antibody or antibody mimetic known in the art, which can be, for non-limiting example, a clinical antibody or clinical antibody mimetic, as discussed in further detail herein. In some embodiments, the extracellular recognition domain of an anti-idiotype polypeptide herein includes an idiotype-binding variable region of an anti-idiotype antibody or an idiotype-binding region of an anti-idiotype antibody mimetic. Such variable region can include a framework that is derived from a human framework region. Such anti-idiotype antibody or antibody mimetic can be any of antibody fragment or any type of antibody mimetic provided herein. As non-limiting examples, the extracellular recognition domain can be an antibody such as a full-length antibody, a single-chain antibody, a Fab fragment, a Fab′ fragment, a (Fab′)2 fragment, a Fv fragment, an scFv, a divalent single-chain antibody, a diabody, a chimeric antibody, or a disbud. In some embodiments, the extracellular recognition domain is a single chain Fv (scFv). In some embodiments, the heavy chain is positioned N-terminal of the light chain in the engineered signaling polypeptide. In other embodiments, the light chain is positioned N-terminal of the heavy chain in the engineered signaling polypeptide. In any of the disclosed embodiments, the heavy and light chains can be separated by a linker as discussed in more detail herein. In any of the disclosed embodiments, the heavy or light chain can be at the N-terminus of the engineered signaling polypeptide and is typically C-terminal of another domain, such as a signal sequence or peptide.

[0166] In some embodiments, the extracellular recognition domain can include one or more domains from or derived from a mouse antibody, a rat antibody, a rabbit antibody, a goat antibody, a chicken antibody, a sheep antibody, a cow antibody, or a llama antibody, or in illustrative embodiments, a human antibody. Other antibody-based recognition domains (cAb VHH (camelid antibody variable domains) and humanized versions, IgNAR VH (shark antibody variable domains) and humanized versions, sdAb VH (single domain antibody variable domains) and “camelized” antibody variable domains are suitable for use as extracellular recognition domains of anti-idiotype polypeptides provided herein, and methods using the same. In some instances, T cell receptor (TCR) based recognition domains can be the extracellular recognition domains. In some embodiments, the extracellular recognition domain can be bispecific or include domains from a bispecific antibody. In some embodiments, the extracellular recognition domain can be multispecific or include domains from a multispecific antibody. Multispecific antibodies have binding specificities for at least two different sites. In certain embodiments, one of the binding specificities is for one target antibody or antibody mimetic and the other is for another target antibody or antibody mimetic. In certain embodiments, bispecific antibodies may bind to two different epitopes of a target antibody or antibody mimetic. In some embodiments, the extracellular recognition domain can include a recognition domain of an anti-idiotype antibody or antibody mimetic, and also include an ASTR of any of the CARs disclosed herein.

[0167] In some embodiments, the extracellular recognition domain can be at least 10, 15, 20, 25, 30, 35, 40, 45, 50, 75, 100, 125, 150, 175, 200, 225, 250, 275, or 300 amino acids in length. In some embodiments, the extracellular recognition domain can be between 10 and 500, 10 and 400, 10 and 300, 10 and 200, 10 and 100, 10 and 50, 10 and 30, 20 and 500, 20 and 400, 20 and 300, 20 and 200, 20 and 100, 20 and 50, 20 and 30, 50 and 500, 50 and 400, 50 and 300, 50 and 200, 50 and 100, 100 and 500, 100 and 400, 100 and 300, 100 and 200, 125 and 275, 150 and 275, or 150 and 250 amino acids in length.

[0168] Methods for making anti-idiotype extracellular recognition domains provided herein, can utilize known methods for making anti-idiotype antibodies and antibody mimetics, applying a strategy, for example that is provided in the Examples herein for an exemplary phage display strategy. Such methods can include makine a library of antibodies or antibody mimetics using virtually any method known in the art for creating such library, and screening the library for binding to the idiotype of a target antibody. The library can be constructed by varying residues of an existing anti-idiotype antibody, or can involve a general antibody or antibody mimetic library that does not start with a selected prior anti-idiotype antibodies. Once the library is designed and constructed, the translated antibody or antibody mimetic protein scaffolds are screened for isolation of mutants with the desired properties. The most commonly employed display systems include phage display, ribosome display, mRNA display, yeast display, and bacterial cell-surface display (Lipovsek and Plückthun, J Immunol Methods. 2004 Jul;290(1-2):51-67). A skilled artisan will understand how to use this and similar systems to identify appropriate anti-idiotype antbodies and antibody mimetics, typically using all or a portion of the target antibody as bate, which can be present on a solid support such as a bead during the screening. Screening can occur over several rounds, where conditions can be varied to improve isolated library members for one or more characteristics, including affinity for the idiotype. Other antibodies or antibody mimetics that have similar constant regions as a target antibody, but a different idiotype can be used to subtract out any library members that bind the target antibody non-specifically. Examples of using phage display to screen for, identify and isolate anti-idiotype antibodies are provided in the Examples herein.

[0169] In some embodiments, binding of the anti-id ERD of the anti-idiotype polypeptide to its target antibody or antibody mimetic prevents and/or blocks binding of the target antibody or antibody mimetic to the cognate antigen of the target antibody or antibody mimetic. In some embodiments, the extracellular recognition domain of the anti-idiotype polypeptide is capable of, adapted for, and/or configured to prevent and/or block binding of the target antibody or antibody mimetic to the cognate antigen of the target antibody or antibody mimetic when the anti-idiotype polypeptide is bound to the target antibody or antibody mimetic. In illustrative embodiments, the target antibody is cetuximab and binding of the extracellular recognition domain of the anti-idiotype polypeptide to cetuximab prevents and/or blocks binding of cetuximab to Epidermal Growth Factor Receptor (EGFR). In some embodiments, the extracellular recognition domain of the anti-idiotype polypeptide is capable of, adapted for, and/or configured to prevent and/or block binding of cetuximab to EGFR when the anti-idiotype polypeptide is bound to cetuximab. In some embodiments, binding of the anti-idiotype polypeptide to the target antibody does not block or prevent binding between the target antibody and its cognate antigen. In illustrative embodiments, binding of the anti-idiotype polypeptide to the target antibody blocks or prevents binding between the target antibody and its cognate antigen. In some embodiments, the extracellular recognition domain recognizes the antigen-binding site of the target antibody or the antibody mimetic. In some embodiments, the extracellular recognition domain recognizes the variable region but does not recognize the antigen-binding site of the target antibody or the antibody mimetic. In some embodiments, the extracellular recognition domain recognizes a portion of the variable region that is not a part of the antigen-binding site of the target antibody or the antibody mimetic. In some embodiments where the extracellular recognition domain recognizes the antigen-binding site of the target antibody or the antibody mimetic, binding of the extracellular recognition domain to the target antibody or antibody mimetic prevents and/or blocks binding of the target antibody or antibody mimetic to the cognate antigen of the target antibody or antibody mimetic. The antigen-binding site can include the residues important for the target antibody or antibody mimetic to recognize its cognate antigen.

[0170] In some embodiments, the anti-id ERD recognizes (e.g., is capable of binding to) cetuximab and comprises any of the sequences provided in this paragraph. In some embodiments, the anti-id ERD can be encoded by a polynucleotide with at least 50%, 60%, 70%, 75%, 80%, 85%, 90%, 95%, 96%, 97%, 98%, 99% or 100% sequence identity to a stretch of at least 10, 15, 20, or all the polynucleotides of one or more of SEQ ID NOs:376-436. In any of the embodiments disclosed herein that include an anti-id ERD, the anti-id ERD can include a polypeptide sequence with at least 50%, 60%, 70%, 75%, 80%, 85%, 90%, 95%, 96%, 97%, 98%, 99% or 100% sequence identity to a stretch of at least 10, 15, 20, or all the amino acids of one or more of SEQ ID NOs:437-497. In some embodiments, the extracellular recognition domain can include a polypeptide sequence with at least 50%, 60%, 70%, 75%, 80%, 85%, 90%, 95%, 96%, 97%, 98%, 99% or 100% sequence identity to a stretch of at least 10, 15, 20, or all of the amino acids of one or more of SEQ ID NOs:498-599. In some embodiments, the extracellular recognition domain can include a polypeptide sequence with at least 50%, 60%, 70%, 75%, 80%, 85%, 90%, 95%, 96%, 97%, 98%, 99% or 100% sequence identity to a stretch of at least 10, 15, 20, or all of the amino acids of one or more of SEQ ID NOs:600-672.

[0171] In some embodiments, the anti-id ERD recognizes (e.g., is capable of binding to) cetuximab and comprises any of the sequences provided in this paragraph. In some embodiments, the HCDR1, HCDR2, and HCDR3 of an extracellular recognition domain can include any of the following combinations of SEQ ID NOs:498, 528, and 560; 499, 529, and 561; 500, 530, and 562; 501, 531, and 563; 502, 532, and 564; 503, 533, and 565; 504, 534, and 566; 505, 535, and 567; 506, 536, and 568; 507, 537, and 569; 508, 538, and 570; 509, 539, and 571; 510, 540, and 572; 511, 541, and 573; 511, 542, and 574; 501, 543, and 575; 512, 544, and 576; 513, 545, and 577; 501, 543, and 578; 514, 546, and 579; 513, 545, and 580; 515, 547, and 581; 516, 548, and 582; 517, 549, and 583; 517, 549, and 584; 518, 550, and 585; 519, 551, and 586; 520, 552, and 587; 521, 553, and 588; 522, 554, and 589; 523, 555, and 590; 513, 545, and 591; 517, 549, and 592; 524, 556, and 593; 513, 545, and 594; 511, 542, and 595; 525, 557, and 596; 526, 558, and 597; 527, 559, and 598; or 503, 533, and 599, respectively, or polypeptide sequences at least 50%, 60%, 70%, 75%, 80%, 85%, 90%, 95%, 96%, 97%, 98%, 99% or 100% sequence identity to a stretch of at least 10, 15, 20, or all of the amino acids of any of the preceding SEQ ID NOs.

[0172] In some embodiments, the anti-id ERD recognizes (e.g., is capable of binding to) cetuximab and comprises any of the sequences provided in this paragraph. In some embodiments, the LCDR1, LCDR2, and LCDR3 of an extracellular recognition domain can include any of the following combinations of SEQ ID NOs:600, 625, and 634; 601, 625, and 635; 600, 625, and 636; 602, 625, and 637; 603, 626, and 638; 603, 626, and 639; 604, 630, and 640; 605, 628, and 641; 606, 625, and 642; 603, 626, and 643; 607, 632, and 644; 608, 625, and 645; 609, 625, and 646; 610, 630, and 647; 604, 630, and 648; 611, 625, and 649; 606, 625, and 650; 612, 625, and 649; 607, 632, and 651; 600, 625, and 652; 600, 625, and 653; 600, 625, and 654; 613, 632, and 655; 614, 625, and 656; 604, 630, and 657; 615, 630, and 658; 616, 625, and 659; 606, 625, and 660; 617, 625, and 661; 604, 630, and 662; 618, 632, and 663; 604, 630, and 664; 619, 630, and 665; 620, 630, and 666; 621, 631, and 667; 606, 627, and 642; 622, 629, and 668; 623, 629, and 669; 600, 625, and 670; 600, 625, and 671; 600, 625, and 672; or 624, 633, and 659, respectively, or polypeptide sequences at least 50%, 60%, 70%, 75%, 80%, 85%, 90%, 95%, 96%, 97%, 98%, 99% or 100% sequence identity to a stretch of at least 10, 15, 20, or all of the amino acids of any of the preceding SEQ ID NOs.

[0173] In some embodiments, the anti-id ERD recognizes (e.g., is capable of binding to) cetuximab and comprises any of the sequences provided in this paragraph. In some embodiments, the HCDR1, HCDR2, HCDR3, LCDR1, LCDR2, and LCDR3 of an extracellular recognition domain can include any of the following combinations of SEQ ID NOs: 498, 528, 560, 600, 625, and 634; 499, 529, 561, 601, 625, and 635; 500, 530, 562, 600, 625, and 636; 501, 531, 563, 602, 625, and 637; 502, 532, 564, 603, 626, and 638; 503, 533, 565, 600, 625, and 634; 504, 534, 566, 603, 626, and 639; 504, 534, 566, 604, 630, and 640; 505, 535, 567, 605, 628, and 641; 506, 536, 568, 606, 625, and 642; 507, 537, 569, 603, 626, and 643; 508, 538, 570, 607, 632, and 644; 509, 539, 571, 608, 625, and 645; 510, 540, 572, 609, 625, and 646; 511, 541, 573, 610, 630, and 647; 511, 542, 574, 604, 630, and 648; 501, 543, 575, 611, 625, and 649; 501, 543, 575, 606, 625, and 650; 501, 543, 575, 612, 625, and 649; 512, 544, 576, 607, 632, and 651; 513, 545, 577, 600, 625, and 652; 501, 543, 578, 600, 625, and 653; 514, 546, 579, 600, 625, and 654; 513, 545, 580, 613, 632, and 655; 513, 545, 580, 606, 625, and 650; 515, 547, 581, 614, 625, and 656; 516, 548, 582, 600, 625, and 634; 517, 549, 583, 604, 630, and 657; 517, 549, 584, 615, 630, and 658; 518, 550, 585, 616, 625, and 659; 519, 551, 586, 606, 625, and 660; 519, 551, 586, 617, 625, and 661; 520, 552, 587, 604, 630, and 662; 521, 553, 588, 618, 632, and 663; 522, 554, 589, 604, 630, and 664; 523, 555, 590, 619, 630, and 665; 513, 545, 591, 620, 630, and 666; 517, 549, 592, 621, 631, and 667; 524, 556, 593, 606, 627, and 642; 513, 545, 594, 622, 629, and 668; 511, 542, 595, 600, 625, and 634; 525, 557, 596, 623, 629, and 669; 500, 530, 562, 600, 625, and 670; 526, 558, 597, 600, 625, and 671; 504, 534, 566, 600, 625, and 672; 527, 559, 598, 600, 625, and 634; 503, 533, 599, 600, 625, and 634; or 518, 550, 585, 624, 633, and 659, respectively, or polypeptide sequences at least 50%, 60%, 70%, 75%, 80%, 85%, 90%, 95%, 96%, 97%, 98%, 99% or 100% sequence identity to a stretch of at least 10, 15, 20, or all of the amino acids of any of the preceding SEQ ID NOs.

[0174] In some embodiments, the extracellular recognition domain can be from or derived from an anti-idiotype antibody mimetic. In some embodiments the anti-idiotype antibody mimetic can be an afflilin, an affimer, an affitin, an alphabody, an alphamab, an anticalin, a peptide aptamer, an armadillo repeat protein, an atrimer, an avimer (also known as avidity multimer), a C-type lectin domain, a cysteine-knot miniprotein, a cyclic peptide, a cytotoxic T-lymphocyte associated protein-4, a DARPin (Designed Ankyrin Repeat Protein), a fibrinogen domain, a fibronectin binding domain (FN3 domain) (e.g., adnectin or monobody), a fynomer, a knottin, a Kunitz domain peptide, a nanofitin, a leucine-rich repeat domain, a lipocalin domain, a mAb 2 or Fcab™, a nanobody, a nanoCLAMP, an OBody, a Pronectin, a single-chain TCR, a tetratricopeptide repeat domain, VHH, or a V-like domain. Not to be limited by theory, antibody mimetics may provide superior properties over antibodies including, but not limited to, superior solubility, tissue penetration, stability towards heat and enzymes (e.g., resistance to enzymatic degradation), and lower production costs.

[0175] In some embodiments, the extracellular recognition domain of the anti-idiotype polypeptide includes an affimer that is capable of binding to a target antibody. The average size of the affimer can be in the range of 12-14 kDa. Not to be limited by theory, the affimers capable of binding to a specific target is designed by selecting an appropriate scaffold that is suitable for incorporation of recognition domains. The scaffold is a three-dimensional protein structure that is suitable for mutations and insertions with enough flexibility in its primary structure that the introduced modifications do not compromise its secondary structure and overall stability. The scaffolds are typically small, thermostable, single-domain proteins without any disulfide bonds or glycosylation. Affimers can be made from two scaffolds, Adhiron scaffolds and human stefin A scaffolds. The stefin A scaffold is engineered from human stefin A protein, whereas the Adhiron scaffold is synthetic, originally based on the sequence of cystatin. After the selection of the scaffold, the library is designed by employing in silico methods and is constructed via molecular biology protocols. Once the possible candidates for mutagenesis are identified, mutant constructs and libraries of the antibody mimetics can be generated at the DNA level by employing either site directed or random mutagenesis strategies. Once the library is designed and constructed, the translated protein scaffolds are screened for isolation of mutants with the desired properties. The most commonly employed display systems include phage display, ribosome display, mRNA display, yeast display, and bacterial cell-surface display. A skilled artisan will understand how to use this and similar systems to identify appropriate anti-idiotype affimers.

[0176] In some embodiments, the extracellular recognition domain of the anti-idiotype polypeptide includes a DARPin that is capable of binding to a target antibody. DARPins are made from tightly packed repeats of 33 amino acid residues. Each repeat forms a structural unit consisting of a β-turn followed by two antiparallel α-helices. DARPins are small proteins having a molecular weight in the range of 14-18 kDa that are extremely thermostable and resistant to proteases and denaturing agents. DARPins usually have a scaffold that is a constant region, and have variable sites in which amino acid substitutions do not alter the protein conformation. The process of designing scaffolds involves the design of a library of protein variants by random site-specific mutagenesis; and selection of molecules using techniques like yeast display, phage display, and ribosome display. DARPins can recognize targets with high specificities and affinities, surpassing that of the antibodies. A skilled artisan will understand how to use this and similar systems to identify appropriate anti-idiotype DARPins.

[0177] In some embodiments, the extracellular recognition domain of the anti-idiotype polypeptide includes a nanobody that is capable of binding to a target antibody. A nanobody is an antigen-binding fragment, with a size of approximately 12-15 kDa. Not to be limited by theory, the nanobody includes the antigen-binding capacity of the original heavy chain antibodies, evolved to be fully functional in the absence of a light chain. Nanobodies consist of three antigenic complementary determining regions (CDRs) and four frame regions (FRs). The CDRs are the binding regions of nanobody to the antigen or a target antibody. To generate nanobodies, a library is prepared from a sample that includes camelids. Phage display can be used to screen and enrich nanobody-phage with specific binding ability from the nanobody library. Functional verification and confirmation of the nanobody expression can also be performed to select the optimal candidate. A skilled artisan will understand how to use this and similar systems to identify appropriate anti-idiotype nanobodies.

### Stalk Domain

[0178] In some embodiments, the anti-idiotype polypeptide includes a stalk which is located in the portion of the anti-idiotype polypeptide lying outside the cell and interposed between the extracellular recognition domain and the membrane association domain. In some embodiments, the stalk has at least 85, 90, 95, 96, 97, 98, 99, or 100% identity to a wild-type CD8 stalk region (TTTPAPRPPTPAPTIASQPLSLRPEACRPAAGGAVHTRGLDFA (SEQ ID NO:2), has at least 85, 90, 95, 96, 97, 98, 99, or 100% identity to a wild-type CD28 stalk region (FCKIEVMYPPPYLDNEKSNGTIIHVKGKHLCPSPLFPGPSKP (SEQ ID NO:3)), or has at least 85, 90, 95, 96, 97, 98, 99, or 100% identity to a wild-type immunoglobulin heavy chain stalk region. In an anti-idiotype polypeptide, the stalk employed allows the extracellular recognition domain, and typically the entire anti-idiotype polypeptide, to retain increased binding to a target antibody or antibody mimetic. In some embodiments, the stalk domain can be heavy chain Fc domain.

[0179] The stalk region can have a length of from about 4 amino acids to about 50 amino acids, e.g., from about 4 aa to about 10 aa, from about 10 aa to about 15 aa, from about 15 aa to about 20 aa, from about 20 aa to about 25 aa, from about 25 aa to about 30 aa, from about 30 aa to about 40 aa, or from about 40 aa to about 50 aa.

[0180] In some embodiments, the stalk of an anti-idiotype polypeptide includes at least one cysteine. For example, in some embodiments, the stalk can include the sequence Cys-Pro-Pro-Cys (SEQ ID NO:4). If present, a cysteine in the stalk of a first anti-idiotype polypeptide can be available to form a disulfide bond with a stalk in a second anti-idiotype polypeptide.

[0181] Stalks can include immunoglobulin hinge region amino acid sequences that are known in the art; see, e.g., Tan et al. (1990) Proc. Natl. Acad. Sci. USA 87:162; and Huck et al. (1986) Nucl. Acids Res. 14:1779. As non-limiting examples, an immunoglobulin hinge region can include a domain with at least 50, 60, 70, 75, 80, 85, 90, 95, 96, 97, 98, 99 or 100% sequence identity to a stretch of at least 10, 15, 20, or all of the amino acids of any of the following amino acid sequences: DKTHT (SEQ ID NO:5); CPPC (SEQ ID NO:4); CPEPKSCDTPPPCPR (SEQ ID NO:6) (see, e.g., Glaser et al. (2005) J. Biol. Chem. 280:41494); ELKTPLGDTTHT (SEQ ID NO:7); KSCDKTHTCP (SEQ ID NO:8); KCCVDCP (SEQ ID NO:9); KYGPPCP (SEQ ID NO: 10); EPKSCDKTHTCPPCP (SEQ ID NO:11) (human IgG1 hinge); ERKCCVECPPCP (SEQ ID NO:12) (human IgG2 hinge); ELKTPLGDTTHTCPRCP (SEQ ID NO:13) (human IgG3 hinge); SPNMVPHAHHAQ (SEQ ID NO:14) (human IgG4 hinge); and the like. The stalk can include a hinge region with an amino acid sequence of a human IgG1, IgG2, IgG3, or IgG4, hinge region. The stalk can include one or more amino acid substitutions and/or insertions and/or deletions compared to a wild-type (naturally-occurring) hinge region. For example, His229 of human IgG 1 hinge can be substituted with Tyr, so that the stalk includes the sequence EPKSCDKTYTCPPCP (SEQ ID NO:15), (see, e.g., Yan et al. (2012) J. Biol. Chem. 287:5891). The stalk can include an amino acid sequence derived from human CD8; e.g., the stalk can include the amino acid sequence: TTTPAPRPPTPAPTIASQPLSLRPEACRPAAGGAVHTRGLDFACD (SEQ ID NO:16), or a variant thereof.

[0182] In some embodiments, the stalk domain of an anti-idiotype polypeptide can include any of the dimerizing moieties disclosed herein. In any aspects or embodiments wherein the stalk domain of an anti-idiotype polypeptide includes a dimerizing motif, the dimerizing motif can be selected from the group consisting of: a leucine zipper motif-containing polypeptide, CD69, CD71, CD72, CD96, Cd105, Cd161, Cd162, Cd249, CD271, and Cd324, as well as mutants and/or active fragments thereof that retain the ability to dimerize.

### Membrane Association Domain

[0183] The membrane association domain of an anti-idiotype polypeptide attaches the extracellular recognition domain of the anti-idiotype polypeptide to a cell membrane. In some embodiments, the membrane association is a transmembrane domain. In some embodiments, the transmembrane domain is a heterologous transmembrane domain. In other embodiments, the transmembrane domain is an endogenous transmembrane domain. In some embodiments, the transmembrane domain is from or derived from an antibody. In illustrative embodiments, the transmembrane domain is from or derived from IgD. In some embodiments, including embodiments where the transmembrane domain is from or derived from IgD, the polynucleotide, vector, or cell can further include nucleic acids encoding IgA and IgB. CA

[0184] In some embodiments, the transmembrane domain is from or derived from BAFFR, C3Z, CEACAM1, CD2, CD3A, CD3B, CD3D, CD3E, CD3G, CD3Z, CD4, CD5, CD7, CD8A, CD8B, CD9, CD11A, CD11B, CD11C, CD11D, CD27, CD16, CD18, CD19, CD22, CD28, CD29, CD33, CD37, CD40, CD45, CD49A, CD49D, CD49F, CD64, CD79A, CD79B, CD80, CD84, CD86, CD96 (Tactile), CD100 (SEMA4D), CD103, C134, CD137, CD154, CD160 (BY55), CD162 (SELPLG), CD226 (DNAM1), CD229 (Ly9), CD247, CRLF2, CRTAM, CSF2RA, CSF2RB, CSF3R, EPOR, FCER1G, FCGR2C, FCGRA2, GHR, HVEM (LIGHTR), IA4, ICOS, IFNAR1, IFNAR2, IFNGR1, IFNGR2, IFNLR1, IL1R1, IL1RAP, IL1RL1, IL1RL2, IL2RA, IL2RB, IL2RG, IL3RA, IL4R, IL5RA, IL6R, IL6ST, IL7RA, IL7RA Ins PPCL, IL9R, IL10RA, IL10RB, IL11RA, IL12RB1, IL12RB2, IL13RA1, IL13RA2, IL15RA, IL17RA, IL17RB, IL17RC, IL17RD, IL17RE, IL18R1, IL18RAP, IL20RA, IL20RB, IL21R, IL22RA1, IL23R, IL27RA, IL31RA, ITGA1, ITGA4, ITGA6, ITGAD, ITGAE, ITGAL, ITGAM, ITGAX, ITGB1, ITGB2, ITGB7, KIRDS2, LEPR, LFA-1 (CD11a, CD18), LIFR, LTBR, MPL, NKp80 (KLRF1), OSMR, PAG/Cbp, PRLR, PSGL1, SLAM (SLAMF1, CD150, IPO-3), SLAMF4 (CD244, 2B4), SLAMF6 (NTB-A, Ly108), SLAMF7, SLAMF8 (BLAME), TNFR2, TNFRSF4, TNFRSF8, TNFRSF9, TNFRSF14, TNFRSF18, VLA1, or VLA-6, or functional mutants and/or fragments thereof. In some embodiments, the transmembrane domain includes a polypeptide sequence with at least 50%, 60%, 70%, 75%, 80%, 85%, 90%, 95%, 96%, 97%, 98%, 99% or 100% sequence identity to a stretch of at least 10, 15, 20, or all of the amino acids of one or more of the following: CD8 alpha TM (SEQ ID NO: 17); CD8 beta TM (SEQ ID NO:18); CD4 stalk (SEQ ID NO:19); CD3Z TM (SEQ ID NO:20); CD28 TM (SEQ ID NO:21); CD134 (OX40) TM: (SEQ ID NO:22); CD7 TM (SEQ ID NO:23); CD8 stalk and TM (SEQ ID NO:24); CD28 stalk and TM (SEQ ID NO:25); the hPDGFRb hinge and TM of SEQ ID NO:676 (this sequence also includes an 8 aa intracellular domain); the CD28 hinge and TM of SEQ ID NO:677 (this sequence also includes a 9 aa intracellular domain); the CD80 hinge and TM domain of SEQ ID NO:678 (this sequence also includes an intracellular domain); or the CD28 hinge and TM of SEQ ID NO:679 (this sequence also includes an intracellular domain).

[0185] In some embodiments, the transmembrane domain of an anti-idiotype polypeptide can include any of the dimerizing moieties disclosed herein. In any aspects or embodiments wherein the transmembrane domain of an anti-idiotype polypeptide includes a dimerizing motif, the dimerizing motif can be selected from the group consisting of: a leucine zipper motif-containing polypeptide, CD69, CD71, CD72, CD96, Cd105, Cd161, Cd162, Cd249, CD271, and Cd324, as well as mutants and/or active fragments thereof that retain the ability to dimerize.

[0186] In some embodiments, the membrane association domain is glycosylphosphatidylinositol (GPI). In some embodiments, the anti-idiotype polypeptide is fused to a lymphoproliferative element, CAR, and/or recombinant TCR, and the membrane association domain can be the transmembrane domain of the lymphoproliferative element, the CAR, and/or the recombinant TCR.

### Intracellular Domain

[0187] The intracellular domain of an anti-idiotype polypeptide, if present, is typically all or, more typically, part of one or more intracellular domains known in the art or disclosed herein. The intracellular domain of an anti-idiotype polypeptide can perform various functions, including both non-signaling functions, for example, to anchor the anti-idiotype polypeptide, and signaling functions, for example, to activate proliferative, survival, and/or cell death signaling or modulate transcriptional activity. Thus, in some embodiments, an anti-idiotype polypeptide includes an intracellular domain. In some embodiments, for example, when one or more of the anti-idiotype polypeptide domains are part of a fusion polypeptide, the intracellular domain of the fusion polypeptide can be the anti-idiotype polypeptide intracellular domain. In other embodiments, the intracellular domain of the fusion polypeptide can be the intracellular domain of the polypeptide to which the anti-idiotype polypeptide is fused, for example, the intracellular domain of a lymphoproliferative element, a CAR, and/or a recombinant TCR. The intracellular domains that can be used include any of the intracellular domains of lymphoproliferative elements, CARs, and recombinant TCRs are disclosed elsewhere herein. Thus, in some embodiments, the intracellular domain of an anti-idiotype polypeptide can include one or more, two or more, or three or more intracellular domains from other polypeptides, for example any of the intracellular domains of a lymphoproliferative element, a CAR, and/or a recombinant TCR disclosed herein. In some embodiments, the intracellular domain can include one or more of any of the intracellular activating domains, modulatory domains, or intracellular signaling domains disclosed elsewhere herein. In some embodiments, the intracellular domain of an anti-idiotype polypeptide can be at least 1, 2, 3, 4, 5, 6, 7, 8, 9, 10, 15, 20, 25, 30 35, 40 45, 50, 75, 100, 125, 150, 175, or 200 amino acids in length. In some embodiments, the intracellular domain of an anti-idiotype polypeptide can be between 1 and 1000, 1 and 900, 1 and 800, 1 and 700, 1 and 600, 1 and 500, 1 and 400, 1 and 300, 1 and 200, 1 and 100, 1 and 50, 1 and 25, 5 and 1000, 5 and 900, 5 and 800, 5 and 700, 5 and 600, 5 and 500, 5 and 400, 5 and 300, 5 and 200, 5 and 100, 5 and 50, 5 and 25, 10 and 1000, 10 and 900, 10 and 800, 10 and 700, 10 and 600, 10 and 500, 10 and 400, 10 and 300, 10 and 200, 10 and 100, 10 and 50, 10 and 25, 25 and 1000, 25 and 900, 25 and 800, 25 and 700, 25 and 600, 25 and 500, 25 and 400, 25 and 300, 25 and 200, 25 and 100, 25 and 50, 50 and 1000, 50 and 900, 50 and 800, 50 and 700, 50 and 600, 50 and 500, 50 and 400, 50 and 300, 50 and 200, 50 and 100, 100 and 1000, 100 and 900, 100 and 800, 100 and 700, 100 and 600, 100 and 500, 100 and 400, 100 and 300, 100 and 200, 200 and 1000, 200 and 900, 200 and 800, 200 and 700, 200 and 600, 200 and 500, 200 and 400, 200 and 300, 300 and 1000, 300 and 900, 300 and 800, 300 and 700, 300 and 600, 300 and 500, or 300 and 400 amino acids in length. In some embodiments, the intracellular domain is an anchor for the anti-idiotype polypeptide. In some embodiments, the intracellular domain has no signaling activity.

[0188] In some embodiments, signaling through the intracellular domains of the anti-idiotype polypeptide is inducible, and signaling can be activated by addition of the target antibody or antibody mimetic. Such anti-idiotype polypeptides can be referred to herein as activity modulators, where upon addition of the target antibody or antibody mimetic, two or more anti-idiotype polypeptides can dimerize through binding the same molecule of target antibody or antibody mimetic. This dimerization of the anti-idiotype polypeptides dimerizes the intracellular domains of the two anti-idiotype polypeptides, resulting in activation based if the appropriate intracellular domains are used. In some embodiments, the intracellular domains of an activity modulating anti-idiotype polypeptide can be activated by dimerization and the only dimerizing moiety on the anti-idiotype polypeptide is the extracellular recognition domain. In other embodiments, the intracellular domains of an activity modulating anti-idiotype polypeptide can be activated by dimerization and the anti-idiotype polypeptide includes a separate inducible or constitutive dimerizing moiety on the anti-idiotype polypeptides besides the extracellular recognition domain. In some embodiments, the intracellular domains of an activity modulating anti-idiotype polypeptide can be activated by multimerization of at least three domains (e.g., trimerization) and the only dimerizing moiety on the anti-idiotype polypeptide is the extracellular recognition domain. In other embodiments, the intracellular domains of an activity modulating anti-idiotype polypeptide can be activated by multimerization of at least three domains (e.g., trimerization) and the anti-idiotype polypeptide includes a separate inducible or constitutive dimerizing moiety on the anti-idiotype polypeptides besides the extracellular recognition domain. In illustrative embodiments, the intracellular domains of an activity modulating anti-idiotype polypeptide that are activated by multimerization of at least three domains (e.g., trimerization) include a separate constitutive dimerizing moiety on the anti-idiotype polypeptides besides the extracellular recognition domain. In some embodiments, the multimerization (e.g., dimerization, trimerization, etc.) of an anti-idiotype polypeptide activates proliferative and/or survival signaling. Such embodiments include, for example, fusion polypeptides where the extracellular recognition domain is attached to a lymphoproliferative element, and an anti-idiotype polypeptide with the intracellular domains from a lymphoproliferative element, for example an intracellular signaling domain from a cytokine receptor. In some embodiments, multimerization of an anti-idiotype polypeptide activates cell death signaling. Such embodiments include, for example, an anti-idiotype polypeptide with the intracellular domains from some of the apoptosis-inducing polypeptides disclosed herein. In some embodiments, the target antibody or antibody mimetic recognized by an anti-idiotype polypeptide includes an Fc domain from IgM or IgA, and binding of the target induces multimerization (e.g., trimerization and higher order multimerization). In such embodiments, the target antibody or antibody mimetic can activate intracellular domains that require higher order multimerization (e.g., trimerization). In some embodiments, the anti-idiotype polypeptide recognizes nebacumab, which includes an Fc domain from IgM, and binding of the the anti-idiotype polypeptide to nebacumab induces multimerization, and activation of the intracellular domain of the anti-idiotype polypeptide.

[0189] In some embodiments, the intracellular domain can include one or more, two or more, three or more, or all of the domains, motifs, and/or mutations of any of the intracellular domains disclosed herein. In some embodiments, the intracellular domain can include one or more, two or more, three or more, or all of the domains, motifs, and/or mutations of any intracellular domains known to induce proliferation and/or survival of T cells and/or NK cells. In some embodiments, the intracellular domain can activate a Jak pathway, a Stat pathway, a Jak/Stat pathway, a TRAF pathway, a PI3K pathway, and/or a PLC pathway. Appropriate intracellular domains for activating the various pathways are disclosed in the “Lymphoproliferative elements” herein and can be used as intracellular domain of an anti-idiotype polypeptide. In some embodiments, the intracellular domain of an anti-idiotype polypeptide can include all or part of one or more intracellular signaling domains from one or more cytokine receptors. In further embodiments, the one or more cytokine receptors can be selected from CD27, CD40, CRLF2, CSF2RA, CSF2RB, CSF3R, EPOR, GHR, IFNAR1, IFNAR2, IFNGR1, IFNGR2, IFNLR1, IL1R1, IL1RAP, IL1RL1, IL1RL2, IL2R, IL2RA, IL2RB, IL2RG, IL3RA, IL4R, IL5RA, IL6R, IL6ST, IL7R, IL7RA, IL9R, IL10RA, IL10RB, IL11RA, IL12RB1, IL13R, IL13RA1, IL13RA2, IL15R, IL15RA, IL17RA, IL17RB, IL17RC, IL17RE, IL18R1, IL18RAP, IL20RA, IL20RB, IL21R, IL22RA1, IL23R, IL27R, IL27RA, IL31RA, LEPR, LIFR, MPL, OSMR, PRLR, TGFβR, TGF(3 decoy receptor, TNFRSF4, TNFRSF8, TNFRSF9, TNFRSF14, or TNFRSF18.

[0190] In some embodiments, the intracellular domain of an anti-idiotype polypeptide includes one or more apoptotic domains known to induce cell death in T cells and/or NK cells. Such intracellular domains are also referred to herein as intracellular apoptotic domains and include domains from apoptosis-inducing polypeptides, referred to herein as apoptotic polypeptides, and functional fragments thereof. The intracellular apoptotic domain of an anti-idiotype polypeptide can include one or more caspase activation and recruitment domains (CARDs), death domains (DDs), death effector domains (DEDs), pyrin domains (PYDs), and/or caspase proteolytic domains. Typically, such apoptotic polypeptides are capable of inducing an apoptotic signal upon dimerization. A skilled artisan will understand how to identify and incorporate these intracellular apoptotic domains (and other apoptosis-inducing domains) into an anti-idiotype polypeptide of the current disclosure. In some embodiments, the intracellular apoptotic domain of an anti-idiotype polypeptide can include one or more CARDs, DDs, DEDs, PYDs, and/or caspase proteolytic domains. In some embodiments, the intracellular apoptotic domain of an anti-idiotype polypeptide can include one or more means for performing the function of a CARD, DD, DED, PYD, and/or caspase proteolytic domain of a caspase, such as of a caspase 2, 8, 9, or 10. In some embodiments, the intracellular apoptotic domain can include one or more CARDs from Apaf-1, DARK, CED-4, CED-3, Dronc, CARMA1, Bcl-10, Nod1, Nod2, RIP2, ICEBERG, RIG-I, MDA5, MAV5, ASC, NALP1, caspase 1, caspase 2, caspase-5, and/or caspase 9, and/or functional fragments thereof. In some embodiments, the intracellular apoptotic domain can include one or more DDs from TNF-R1, Fas, p75, TRADD, FADD, RIP, MyD88, IRAKs, Pelle, Tube, PIDD, RAIDD, and/or MALT1, and/or functional fragments thereof. In some embodiments, the intracellular apoptotic domain can include one or more DEDs from FADD, caspase 8, caspase 10, c-FLIP, v-FLIPs, MC159, PEA-15, DEDD, and/or DEDD2, and/or functional fragments thereof. In some embodiments, the intracellular apoptotic domain can include one or more PYDs from ASC, ASC2, NALP1, NALP1, NALP3, NALP4, NALP5, NALP6, NALP7, NALP8, NALP9, NALP10, NALP11, and/or NALP12, and/or functional fragments thereof. In some embodiments, the intracellular apoptotic domain can include one or more domains from caspase 1, caspase 2, caspase 3, caspase 4, caspase 5, caspase 6, caspase 7, caspase 8, caspase 9, caspase 10, caspase 11, caspase 12, caspase 13, caspase 14, FAS (CD95 or Apo-1 antigen), TNF-R1, Death Receptor 3 (DR3), Death Receptor 4 (DR4 or TRAIL Receptor-I), Death Receptor 5 (DR5 or TRAIL Receptor-II), FADD, APAF1, CRADD/RAIDD, ASC, Bcl-2 family members, Bax, Bak, RIPK3, and/or RIPK1-RHIM, and/or functional fragments thereof. Not to be limited by theory, Bax and Bak are pro-apoptotic Bcl-2 family members that can cause mitochondrial depolarization (or mislocalization of anti-apoptotic family members, like Bcl-xL or Bcl-2). Not to be limited by theory, the RIPK3 and RIPK1-RHIM domain can trigger a related form of pro-inflammatory cell death, called necroptosis, due to MLKL-mediated membrane lysis. In illustrative embodiments, the intracellular apoptotic domain includes one or more of a caspase 2 polypeptide, a caspase 8 polypeptide, a caspase 9 polypeptide, and/or a caspase 10 polypeptide. Caspase 2, caspase 8, caspase 9, and caspase 10 are also referred to herein as initiator caspases. In some embodiments, the intracellular domain of an anti-idiotype polypeptide includes a fusion polypeptide of one or more domains of an initiator caspase and one or more domains of an effector caspase. In some embodiments, the initiator caspase can be caspase 2, caspase 8, caspase 9, and/or caspase 10. In some embodiments, the effector caspase can be caspase 3, caspase 6, and/or caspase 7. In some embodiments, intracellular apoptotic domain of an anti-idiotype polypeptide can include at least one domain from one or more of caspase 2, caspase 8, caspase 9, or caspase 10, or a functional fragment thereof. In some embodiments, the functional fragment is an intracellular domain from a caspase polypeptide that lacks one or more domains. In some embodiments, the one or more domains lacking in the functional fragment can be CARDs, DDs, DEDs, PYDs, and/or caspase proteolytic domains. In some embodiments, the functional fragment is a caspase 2 polypeptide lacking a CARD. In some embodiments, the functional fragment is a caspase 8 polypeptide lacking a DED.

[0191] In some embodiments, the intracellular apoptotic domain of an anti-idiotype polypeptide includes one or more domains from a caspase 2 polypeptide. In some embodiments, the intracellular apoptotic domain includes a polypeptide sequence with at least 50%, 60%, 70%, 75%, 80%, 85%, 90%, 95%, 96%, 97%, 98%, 99% or 100% sequence identity to a stretch of at least 10, 15, 20, or all of SEQ ID NO:680. In some embodiments, the intracellular apoptotic domain includes all domains of the protein of SEQ ID NO:680. In some embodiments, the intracellular apoptotic domain includes one or more domains of the polypeptide of SEQ ID NO:680. In some embodiments, the intracellular apoptotic domain includes one or more domains of the polypeptide of SEQ ID NO:680. In some embodiments, the intracellular apoptotic domain includes a polypeptide sequence with at least 50%, 60%, 70%, 75%, 80%, 85%, 90%, 95%, 96%, 97%, 98%, 99% or 100% sequence identity to a stretch of at least 10, 15, 20, or all of the CARD of caspase 2 (amino acids 32 to 118 of SEQ ID NO:680) and/or the CASc domain of caspase 2 (amino acids 192 to 447 of SEQ ID NO:680). In some embodiments, the intracellular apoptotic domain includes a polypeptide sequence with at least 50%, 60%, 70%, 75%, 80%, 85%, 90%, 95%, 96%, 97%, 98%, 99% or 100% sequence identity to a stretch of at least 10, 15, 20, 25, 30, 35, 40, 45, or 50 amino acids of SEQ ID NO:680, wherein the polypeptide sequence does not include a stretch of at least 10, 15, 20, or all the amino acids of the CARD (amino acids 32-118 of SEQ ID NO:680) and/or the CASc domain of caspase 2 (amino acids 192 to 447 of SEQ ID NO:680). In some embodiments, the intracellular apoptotic domain includes a polypeptide sequence with at least 50%, 60%, 70%, 75%, 80%, 85%, 90%, 95%, 96%, 97%, 98%, 99% or 100% sequence identity to a stretch of at least 10, 15, 20, or all of amino acids 327 to 452 of SEQ ID NO:680 or of amino acids 359 to 452 of SEQ ID NO:680.

[0192] In some embodiments, the intracellular apoptotic domain of an anti-idiotype polypeptide includes one or more domains from a caspase 8 polypeptide. In some embodiments, the intracellular apoptotic domain includes a polypeptide sequence with at least 50%, 60%, 70%, 75%, 80%, 85%, 90%, 95%, 96%, 97%, 98%, 99% or 100% sequence identity to a stretch of at least 10, 15, 20, or all of SEQ ID NO:681. In some embodiments, the intracellular apoptotic domain includes all domains of the protein of SEQ ID NO:681. In some embodiments, the intracellular apoptotic domain includes one or more domains of the protein of SEQ ID NO:681. In some embodiments, the intracellular apoptotic domain includes a polypeptide sequence with at least 50%, 60%, 70%, 75%, 80%, 85%, 90%, 95%, 96%, 97%, 98%, 99% or 100% sequence identity to a stretch of at least 10, 15, 20, or all of the DED of caspase 8 (amino acids 3 to 84 of SEQ ID NO:681), the DD of caspase 8 (amino acids 134 to 212 of SEQ ID NO:681), and/or CASc domain of caspase 8 amino acids 242 to 494 of SEQ ID NO:681. In some embodiments, the intracellular apoptotic domain includes a polypeptide sequence with at least 50%, 60%, 70%, 75%, 80%, 85%, 90%, 95%, 96%, 97%, 98%, 99% or 100% sequence identity to a stretch of at least 10, 15, 20, 25, 30, 35, 40, 45, or 50 amino acids of SEQ ID NO:681, wherein the polypeptide sequence does not include a stretch of at least 10, 15, 20, or all the amino acids of the DED of caspase 8 (amino acids 3 to 84 of SEQ ID NO:681), the DD of caspase 8 (amino acids 134 to 212 of SEQ ID NO:681), and/or CASc domain of caspase 8 amino acids 242 to 494 of SEQ ID NO:681. In some embodiments, the intracellular apoptotic domain includes a polypeptide sequence with at least 50%, 60%, 70%, 75%, 80%, 85%, 90%, 95%, 96%, 97%, 98%, 99% or 100% sequence identity to a stretch of at least 10, 15, 20, or all of amino acids 384 to 496 of SEQ ID NO:681 or of amino acids 411 to 496 SEQ ID NO:681.

[0193] In some embodiments, the intracellular apoptotic domain of an anti-idiotype polypeptide includes one or more domains from a caspase 9 polypeptide. In some embodiments, the intracellular apoptotic domain includes a polypeptide sequence with at least 50%, 60%, 70%, 75%, 80%, 85%, 90%, 95%, 96%, 97%, 98%, 99% or 100% sequence identity to a stretch of at least 10, 15, 20, or all of the amino acids of SEQ ID NO:682. In some embodiments, the intracellular apoptotic domain includes all domains of the protein of SEQ ID NO:682. In some embodiments, the intracellular apoptotic domain includes one or more domains of the protein of SEQ ID NO:682. In some embodiments, the intracellular apoptotic domain includes a polypeptide sequence with at least 50%, 60%, 70%, 75%, 80%, 85%, 90%, 95%, 96%, 97%, 98%, 99% or 100% sequence identity to a stretch of at least 10, 15, 20, or all of the CARD of caspase 9 (amino acids 17 to 90 of SEQ ID NO:682) and/or the CASc domain of caspase 9 (amino acids 152 to 414 of SEQ ID NO:682). In some embodiments, the intracellular apoptotic domain includes a polypeptide sequence with at least 50%, 60%, 70%, 75%, 80%, 85%, 90%, 95%, 96%, 97%, 98%, 99% or 100% sequence identity to a stretch of at least 10, 15, 20, 25, 30, 35, 40, 45, or 50 amino acids of SEQ ID NO:682, wherein the polypeptide sequence does not include a stretch of at least 10, 15, 20, or all the amino acids of the CARD of caspase 9 (amino acids 17 to 90 of SEQ ID NO:682) and/or the CASc domain of caspase 9 (amino acids 152 to 414 of SEQ ID NO:682). In some embodiments, the intracellular apoptotic domain includes a polypeptide sequence with at least 50%, 60%, 70%, 75%, 80%, 85%, 90%, 95%, 96%, 97%, 98%, 99% or 100% sequence identity to a stretch of at least 10, 15, 20, or all of amino acids 294 to 416 of SEQ ID NO:682 or of amino acids 336 to 416 of SEQ ID NO:682.

[0194] In some embodiments, the intracellular apoptotic domain of an anti-idiotype polypeptide includes one or more domains from a caspase 10 polypeptide. In some embodiments, the intracellular apoptotic domain includes a polypeptide sequence with at least 50%, 60%, 70%, 75%, 80%, 85%, 90%, 95%, 96%, 97%, 98%, 99% or 100% sequence identity to a stretch of at least 10, 15, 20, or all of SEQ ID NO:683. In some embodiments, the intracellular apoptotic domain includes all domains of the protein of SEQ ID NO:683. In some embodiments, the intracellular apoptotic domain includes one or more domains of the protein of SEQ ID NO:683. In some embodiments, the intracellular apoptotic domain includes a polypeptide sequence with at least 50%, 60%, 70%, 75%, 80%, 85%, 90%, 95%, 96%, 97%, 98%, 99% or 100% sequence identity to a stretch of at least 10, 15, 20, or all of the DD of caspase 10 (amino acids 18 to 99 of SEQ ID NO:683), the DED of caspase 10 (amino acids 112 to 190 of SEQ ID NO:683), and/or the CASc domain of caspase 10 (amino acids 233 to 474 of SEQ ID NO:683). In some embodiments, the intracellular apoptotic domain includes a polypeptide sequence with at least 50%, 60%, 70%, 75%, 80%, 85%, 90%, 95%, 96%, 97%, 98%, 99% or 100% sequence identity to a stretch of at least 10, 15, 20, 25, 30, 35, 40, 45, or 50 amino acids of SEQ ID NO:683, wherein the polypeptide sequence does not include a stretch of at least 10, 15, 20, or all the amino acids of the DD of caspase 10 (amino acids 18 to 99 of SEQ ID NO:683), the DED of caspase 10 (amino acids 112 to 190 of SEQ ID NO:683), and/or the CASc domain of caspase 10 (amino acids 233 to 474 of SEQ ID NO:683). In some embodiments, the intracellular apoptotic domain includes a polypeptide sequence with at least 50%, 60%, 70%, 75%, 80%, 85%, 90%, 95%, 96%, 97%, 98%, 99% or 100% sequence identity to a stretch of at least 10, 15, 20, or all of amino acids 365 to 478 of SEQ ID NO:683 or of amino acids 388 to 478 of SEQ ID NO:683.

[0195] In some embodiments, the intracellular apoptotic domain of an anti-idiotype polypeptide can include one or more means for activating an initiator caspase or an effector caspase, or both. In some embodiments, the intracellular apoptotic domain of an anti-idiotype polypeptide can include one or more means for binding to a death domain. In some embodiments, the intracellular apoptotic domain of an anti-idiotype polypeptide can include one or more means for performing the function of a death domain of caspase 2, 3, 9, or 10, or FAS or a TNF receptor ICD. In some illustrative embodiments, these anti-idiotype polypeptides further comprise a dimerizing moiety, wherein the dimerizing moiety is constitutively dimerized. In some embodiments, the intracellular apoptotic domain of an anti-idiotype polypeptide intracellular domain includes one or more domains from a FAS (CD95 or Apo-I antigen) polypeptide. In some embodiments, the intracellular apoptotic domain includes a polypeptide sequence with at least 50%, 60%, 70%, 75%, 80%, 85%, 90%, 95%, 96%, 97%, 98%, 99% or 100% sequence identity to a stretch of at least 10, 15, 20, or all of SEQ ID NO:684. In some embodiments, the intracellular apoptotic domain includes all domains of the protein of SEQ ID NO:684. In some embodiments, the intracellular apoptotic domain includes one or more domains of the protein of SEQ ID NO:684. In some embodiments, the intracellular apoptotic domain includes a polypeptide sequence with at least 50%, 60%, 70%, 75%, 80%, 85%, 90%, 95%, 96%, 97%, 98%, 99% or 100% sequence identity to a stretch of at least 10, 15, 20, or all of the DD of FAS polypeptide (amino acids 257 to 341 of SEQ ID NO:684). In some embodiments, the intracellular apoptotic domain includes a polypeptide sequence with at least 50%, 60%, 70%, 75%, 80%, 85%, 90%, 95%, 96%, 97%, 98%, 99% or 100% sequence identity to a stretch of at least 10, 15, 20, 25, 30, 35, 40, 45, or 50 amino acids of SEQ ID NO:684, wherein the polypeptide sequence does not include a stretch of at least 10, 15, 20, or all the amino acids of the DD of FAS polypeptide (amino acids 257 to 341 of SEQ ID NO:684).

[0196] In some embodiments, the intracellular apoptotic domain of an anti-idiotype polypeptide includes one or more domains from a TNF-R1 (Tumor necrosis factor receptor superfamily member 1) polypeptide. In some embodiments, the intracellular apoptotic domain includes a polypeptide sequence with at least 50%, 60%, 70%, 75%, 80%, 85%, 90%, 95%, 96%, 97%, 98%, 99% or 100% sequence identity to a stretch of at least 10, 15, 20, or all of SEQ ID NO:685. In some embodiments, the intracellular apoptotic domain includes all domains of the protein of SEQ ID NO:685. In some embodiments, the intracellular apoptotic domain includes one or more domains of the protein of SEQ ID NO:685. In some embodiments, the intracellular apoptotic domain includes a polypeptide sequence with at least 50%, 60%, 70%, 75%, 80%, 85%, 90%, 95%, 96%, 97%, 98%, 99% or 100% sequence identity to a stretch of at least 10, 15, 20, or all of the DD of TNF-R1 polypeptide (amino acids 358 to 438 of SEQ ID NO:685). In some embodiments, the intracellular apoptotic domain includes a polypeptide sequence with at least 50%, 60%, 70%, 75%, 80%, 85%, 90%, 95%, 96%, 97%, 98%, 99% or 100% sequence identity to a stretch of at least 10, 15, 20, 25, 30, 35, 40, 45, or 50 amino acids of SEQ ID NO:685, wherein the polypeptide sequence does not include a stretch of at least 10, 15, 20, or all the amino acids of the DD of TNF-R1 polypeptide (amino acids 358 to 438 of SEQ ID NO:685).

[0197] In some embodiments, the intracellular apoptotic domain of an anti-idiotype polypeptide includes one or more domains from a DR-3 (Tumor necrosis factor receptor superfamily member 25) polypeptide. In some embodiments, the intracellular apoptotic domain includes a polypeptide sequence with at least 50%, 60%, 70%, 75%, 80%, 85%, 90%, 95%, 96%, 97%, 98%, 99% or 100% sequence identity to a stretch of at least 10, 15, 20, or all of SEQ ID NO:686. In some embodiments, the intracellular apoptotic domain includes all domains of the protein of SEQ ID NO:686. In some embodiments, the intracellular apoptotic domain includes one or more domains of the protein of SEQ ID NO:686. In some embodiments, the intracellular apoptotic domain includes a polypeptide sequence with at least 50%, 60%, 70%, 75%, 80%, 85%, 90%, 95%, 96%, 97%, 98%, 99% or 100% sequence identity to a stretch of at least 10, 15, 20, or all of the DD of DR-3 polypeptide (amino acids 32 to 145 of SEQ ID NO:686). In some embodiments, the intracellular apoptotic domain includes a polypeptide sequence with at least 50%, 60%, 70%, 75%, 80%, 85%, 90%, 95%, 96%, 97%, 98%, 99% or 100% sequence identity to a stretch of at least 10, 15, 20, 25, 30, 35, 40, 45, or 50 amino acids of SEQ ID NO:686, wherein the polypeptide sequence does not include a stretch of at least 10, 15, 20, or all the amino acids of the DD of DR-3 polypeptide (amino acids 32 to 145 of SEQ ID NO:686).

[0198] In some embodiments, the intracellular apoptotic domain of an anti-idiotype polypeptide includes one or more domains from a DR-4 (Tumor necrosis factor receptor superfamily member 10A; TRAIL Receptor-I) polypeptide. In some embodiments, the intracellular apoptotic domain includes a polypeptide sequence with at least 50%, 60%, 70%, 75%, 80%, 85%, 90%, 95%, 96%, 97%, 98%, 99% or 100% sequence identity to a stretch of at least 10, 15, 20, or all of SEQ ID NO:687. In some embodiments, the intracellular apoptotic domain includes all domains of the protein of SEQ ID NO:687. In some embodiments, the intracellular apoptotic domain includes one or more domains of the protein of SEQ ID NO:687. In some embodiments, the intracellular apoptotic domain includes a polypeptide sequence with at least 50%, 60%, 70%, 75%, 80%, 85%, 90%, 95%, 96%, 97%, 98%, 99% or 100% sequence identity to a stretch of at least 10, 15, 20, or all of the DD of DR-4 polypeptide (amino acids 367 to 454 of SEQ ID NO:687). In some embodiments, the intracellular apoptotic domain includes a polypeptide sequence with at least 50%, 60%, 70%, 75%, 80%, 85%, 90%, 95%, 96%, 97%, 98%, 99% or 100% sequence identity to a stretch of at least 10, 15, 20, 25, 30, 35, 40, 45, or 50 amino acids of SEQ ID NO:687, wherein the polypeptide sequence does not include a stretch of at least 10, 15, 20, or all the amino acids of the DD of DR-4 polypeptide (amino acids 367 to 454 of SEQ ID NO:687).

[0199] In some embodiments, the intracellular apoptotic domain of an anti-idiotype polypeptide includes one or more domains from a DR-5 (Tumor necrosis factor receptor superfamily member 10B; TRAIL Receptor-II) polypeptide. In some embodiments, the intracellular apoptotic domain includes a polypeptide sequence with at least 50%, 60%, 70%, 75%, 80%, 85%, 90%, 95%, 96%, 97%, 98%, 99% or 100% sequence identity to a stretch of at least 10, 15, 20, or all of SEQ ID NO:688. In some embodiments, the intracellular apoptotic domain includes all domains of the protein of SEQ ID NO:688. In some embodiments, the intracellular apoptotic domain includes one or more domains of the protein of SEQ ID NO:688. In some embodiments, the intracellular apoptotic domain includes a polypeptide sequence with at least 50%, 60%, 70%, 75%, 80%, 85%, 90%, 95%, 96%, 97%, 98%, 99% or 100% sequence identity to a stretch of at least 10, 15, 20, or all of the DD of DR-5 polypeptide (amino acids 341 to 428 of SEQ ID NO:688). In some embodiments, the intracellular apoptotic domain includes a polypeptide sequence with at least 50%, 60%, 70%, 75%, 80%, 85%, 90%, 95%, 96%, 97%, 98%, 99% or 100% sequence identity to a stretch of at least 10, 15, 20, 25, 30, 35, 40, 45, or 50 amino acids of SEQ ID NO:688, wherein the polypeptide sequence does not include a stretch of at least 10, 15, 20, or all the amino acids of the DD of DR-5 polypeptide (amino acids 341 to 428 of SEQ ID NO:688).

[0200] In some embodiments, the anti-idiotype polypeptide includes a cleavable signal. In some embodiments, the cleavable signal can include a binding-induced proteolytic cleavage site of a Notch receptor. In some embodiments, the cleavable signal can include a gamma secretase recognition sequence.

[0201] In some embodiments, the anti-idiotype polypeptide includes a Notch receptor that includes an extracellular domain having a recognition site for a target antibody or a target antibody mimetic, a transmembrane domain having a binding induced proteolytic cleavage site, and one or more intracellular domains. In some embodiments, the intracellular domains can include one or more transcription factor. Not to be limited by theory, engagement of the extracellular domain of the Notch receptor with its ligand (that can be a target antibody or antibody mimetic) leads to intramembrane proteolysis through dimerization of the receptor (sequential proteolysis by a disintegrin and metalloproteinase (ADAM) metalloprotease and the gamma-secretase complex). The induced cleavage of the receptor releases the intracellular fragment of Notch. In some embodiments, the notch receptor, which is required for dimerization, can be absent from the anti-idiotype polypeptide. In further embodiments, the anti-idiotype polypeptide can include an extracellular recognition domain, which can provide dimerization upon addition of the antibody or antibody mimetic. The Notch intracellular domain is a transcriptional regulator that is released from the membrane upon dimerization and translocates into the nucleus to activate target genes that play key roles in cell-cell signaling during development. In some embodiments, the intracellular domain of an anti-idiotype polypeptide can include the Notch intracellular domain. Such intracellular domains on anti-idiotype polypeptides that regulate transcription are referred to herein as intracellular transcriptional domains, and can increase or decrease expression of target genes to which the intracellular transcriptional domains bind. In some embodiments, the intracellular domain is a transcriptional activator and increases expression. In some embodiments, the intracellular domain is a transcriptional repressor and decreases expression. In some embodiments, the intracellular domain of an anti-idiotype polypeptide can be an artificial transcription factor. In some embodiments, the artificial transcription factor can include domains from zinc-finger nucleases, Ga14, and/or tetR, or any other transcription factor known in the art. In some embodiments, the intracellular domain is a site-specific nuclease. The site-specific nuclease can be one or more of zinc finger nuclease (ZFN), Transcription activator-like effector nucleases (TALEN), CRISPR/Cas9 system. In some embodiments, the intracellular domain includes one or more of the domains of a Caspase 9 polypeptide. In some embodiments, the intracellular domain is a recombinase. In some embodiments, the intracellular domain is an inhibitory immunoreceptor. In some embodiments, the intracellular domain is an activating immunoreceptor. In some embodiments, release of the intracellular domain modulates proliferation of the cell. In some embodiments, release of the intracellular domain modulates apoptosis in the cell. In some embodiments, release of the intracellular domain induces cell death by a mechanism other than apoptosis. In some embodiments, release of the intracellular domain modulates gene expression in the cell through transcriptional regulation, chromatin regulation, translation, trafficking or post-translational processing. In some embodiments, release of the intracellular domain modulates differentiation of the cell. In some embodiments, release of the intracellular domain modulates migration of the cell. In some embodiments, release of the intracellular domain modulates the expression and secretion of a molecule from the cell. In some embodiments, release of the intracellular domain modulates adhesion of the cell to a second cell or to an extracellular matrix. In some embodiments, release of the intracellular domain induces de novo expression a gene product in the cell. In some embodiments, release of the intracellular domain induces de novo expression a gene product in the cell, wherein the gene product is a transcriptional activator, a transcriptional repressor, a chimeric antigen receptor, a second chimeric Notch receptor polypeptide, a translation regulator, a cytokine, a hormone, a chemokine, or an antibody. Some of the examples of such notch receptors and the intracellular domain which gets released upon the binding of the target antibody or antibody mimetic to the notch receptor provided in the U.S. Pat. US10590182B2 are to be incorporated herein.

[0202] In some embodiments, the anti-idiotype polypeptide can include a cleavable signal that can be one or more gamma secretase substrate sequences that are recognizable by gamma secretase for cleavage. The gamma secretase substrate sequences (also known as the recognition sequences for gamma secretase) are the sequences from the substrates of the gamma-secretase owing to which the substrate gets cleaved. In some embodiments, the one or more gamma secretase substrate sequences can be from one or more polypeptides such as ERBB4, INSR, IGF1R, CSF1R, VEGFR1, VEGFR2, VEGFR3, FGFR3, FGFR4, PTK7, TRKA, TRKB, MUSK, MET, AXL, MER, TYRO3, TIE1, EPHA2, EPHA4, EPHA5, EPHA7, EPHB2, EPHB3, EPHB4, EPHB6, RYK, Alcadein α, Alcadein β, Alcadein γ, APLP1, APLP2, APP, CD44, E-Cadherin, EpCAM, GHR, IL-1R2, Neuregulin-1, Notch-1, Notch-2, Notch-3, Notch-4, P75 NTR, Podoplanin, PTK7, and Syndecan-3.

[0203] In some embodiments, the anti-idiotype polypeptide can include gamma secretase substrate sequence of Alcadein a polypeptide. In some embodiments, the anti-idiotype polypeptide includes a polypeptide sequence with at least 50%, 60%, 70%, 75%, 80%, 85%, 90%, 95%, 96%, 97%, 98%, 99% or 100% sequence identity to a stretch of at least 10, 15, 20, or all the amino acids of SEQ ID NO:689. In some embodiments, the anti-idiotype polypeptide can include gamma secretase substrate sequence of Alcadein β polypeptide. In some embodiments, the anti-idiotype polypeptide includes a polypeptide sequence with at least 50%, 60%, 70%, 75%, 80%, 85%, 90%, 95%, 96%, 97%, 98%, 99% or 100% sequence identity to a stretch of at least 10, 15, 20, or all the amino acids of SEQ ID NO:690. In some embodiments, the anti-idiotype polypeptide can include gamma secretase substrate sequence of (3 Alcadein γ polypeptide. In some embodiments, the anti-idiotype polypeptide includes a polypeptide sequence with at least 50%, 60%, 70%, 75%, 80%, 85%, 90%, 95%, 96%, 97%, 98%, 99% or 100% sequence identity to a stretch of at least 10, 15, 20, or all the amino acids of SEQ ID NO:691. In some embodiments, the anti-idiotype polypeptide can include gamma secretase substrate sequence of APLP1 polypeptide. In some embodiments, the anti-idiotype polypeptide includes a polypeptide sequence with at least 50%, 60%, 70%, 75%, 80%, 85%, 90%, 95%, 96%, 97%, 98%, 99% or 100% sequence identity to a stretch of at least 10, 15, 20, or all the amino acids of SEQ ID NO:692. In some embodiments, the anti-idiotype polypeptide can include gamma secretase substrate sequence of APLP2 polypeptide. In some embodiments, the anti-idiotype polypeptide includes a polypeptide sequence with at least 50%, 60%, 70%, 75%, 80%, 85%, 90%, 95%, 96%, 97%, 98%, 99% or 100% sequence identity to a stretch of at least 10, 15, 20, or all the amino acids of SEQ ID NO:693. In some embodiments, the anti-idiotype polypeptide can include gamma secretase substrate sequence of Notch-1 polypeptide. In some embodiments, the anti-idiotype polypeptide includes a polypeptide sequence with at least 50%, 60%, 70%, 75%, 80%, 85%, 90%, 95%, 96%, 97%, 98%, 99% or 100% sequence identity to a stretch of at least 10, 15, 20, or all the amino acids of SEQ ID NO:694. In some embodiments, the anti-idiotype polypeptide can include gamma secretase substrate sequence of Notch-2 polypeptide. In some embodiments, the anti-idiotype polypeptide includes a polypeptide sequence with at least 50%, 60%, 70%, 75%, 80%, 85%, 90%, 95%, 96%, 97%, 98%, 99% or 100% sequence identity to a stretch of at least 10, 15, 20, or all the amino acids of SEQ ID NO:695. In some embodiments, the anti-idiotype polypeptide can include gamma secretase substrate sequence of Notch-3 polypeptide. In some embodiments, the anti-idiotype polypeptide includes a polypeptide sequence with at least 50%, 60%, 70%, 75%, 80%, 85%, 90%, 95%, 96%, 97%, 98%, 99% or 100% sequence identity to a stretch of at least 10, 15, 20, or all the amino acids of SEQ ID NO:696. In some embodiments, the anti-idiotype polypeptide can include gamma secretase substrate sequence of Notch-4 polypeptide. In some embodiments, the anti-idiotype polypeptide includes a polypeptide sequence with at least 50%, 60%, 70%, 75%, 80%, 85%, 90%, 95%, 96%, 97%, 98%, 99% or 100% sequence identity to a stretch of at least 10, 15, 20, or all the amino acids of SEQ ID NO:697. Linkers

[0204] In some embodiments, the anti-idiotype polypeptide can include a linker between any two adjacent domains. For example, a linker can be between the transmembrane domain and the first intracellular domain. As another example, the extracellular recognition domain of the anti-idiotype can be an antibody and a linker can be between the heavy chain and the light chain. As another example, a linker can be between the extracellular recognition domain and the transmembrane domain and another linker can be between the transmembrane domain and the intracellular domain. As another example, a linker can be between a first intracellular domain and a second intracellular domain. As another example, the linker can be between the extracellular recognition domain and the intracellular domain.

[0205] The linker peptide may have any of a variety of amino acid sequences. Proteins can be joined by a spacer peptide, generally of a flexible nature, although other chemical linkages are not excluded. A linker can be a peptide of between about 1 and about 100 amino acids in length, or between about 1 and about 25 amino acids in length. These linkers can be produced by using synthetic, linker-encoding oligonucleotides to couple the proteins. Peptide linkers with a degree of flexibility can be used. The linking peptides may have virtually any amino acid sequence, bearing in mind that suitable linkers will have a sequence that results in a generally flexible peptide. The use of small amino acids, such as glycine and alanine, are typically of use in creating a flexible peptide. The creation of such sequences is routine to those of skill in the art.

[0206] Suitable linkers can be readily selected and can be of any of a suitable of different lengths, such as from 1 amino acid (e.g., Gly) to 20 amino acids, from 2 amino acids to 15 amino acids, from 3 amino acids to 12 amino acids, including 4 amino acids to 10 amino acids, 5 amino acids to 9 amino acids, 6 amino acids to 8 amino acids, or 7 amino acids to 8 amino acids, and may be 1, 2, 3, 4, 5, 6, or 7 amino acids.

[0207] Exemplary flexible linkers include glycine polymers (G)ₙ, glycine-serine polymers (including, for example, (GS)ₙ, (GSGGS)ₙ, (GGS)ₙ, (GGGS)ₙ, and (GGGGS)ₙ where n is an integer of at least one), glycine-alanine polymers, alanine-serine polymers, and other flexible linkers known in the art. Glycine and glycine-serine polymers are of interest since both of these amino acids are relatively unstructured, and therefore may serve as a neutral tether between components. Glycine polymers are of particular interest since glycine accesses significantly more phi-psi space than even alanine, and is much less restricted than residues with longer side chains (see Scheraga, Rev. Computational Chem. 11173-142 (1992)). Exemplary flexible linkers include, but are not limited GGGGSGGGGS (SEQ ID NO:674), GGGGSGGGGSGGGGS (SEQ ID NO:63), GGGGSGGGGSGGGGSGGGGS (SEQ ID NO:372), GGGGSGGGGSGGGGSGGGGSGGGGS (SEQ ID NO:675), GGGGSGGGGSGGGGSGGGGSGGGGSGGGGS (SEQ ID NO:64), GGSSRSS (SEQ ID NO:673), GGGGSGGGSGGGGS (SEQ ID NO:65), GGSG (SEQ ID NO:66), GGSGG (SEQ ID NO:67), GSGSG (SEQ ID NO:68), GSGGG (SEQ ID NO:69), GGGSG (SEQ ID NO:70), GSSSG (SEQ ID NO:71), and the like. The ordinarily skilled artisan will recognize that design of a peptide conjugated to any elements described above can include linkers that are all or partially flexible, such that the linker can include a flexible linker as well as one or more portions that confer less flexible structure.

### Anti-Idiotype Fusion Polypeptides

[0208] Anti-idiotype polypeptides can function as single polypeptides, or can function as fusions to other polypeptides. The fusion polypeptides can include only the extracellular recognition domains of one or more anti-idiotype polypeptides or the fusion polypeptides can further include one or more of the other domains of the anti-idiotype polypeptides. Based on the presence of the extracellular recognition domain from the anti-idiotype polypeptide, the fusion polypeptides can have different activities based on the presence or absence of the target antibody or antibody mimetic. For example, a constitutively active lymphoproliferative element can include an extracellular recognition domain from an anti-idiotype polypeptide that recognizes a target antibody. In the absence of the target antibody, the constitutively active lymphoproliferative element can promote proliferation and/or survival of the cell expressing the fusion polypeptide. In the presence of the target antibody, for example a target antibody that induces ADCC, binding of the target antibody to the extracellular recognition domain can result in death of the cell expressing the fusion polypeptide with the constitutive lymphoproliferative element. In some embodiments, the extracellular recognition domain of a fusion polypeptide can perform any of the functions of an anti-idiotype polypeptide disclosed herein, including, for example, acting as a safety switch and acting as an activity modulator. In such fusion polypeptides, the membrane association domain of the anti-idiotype polypeptide can be provided by the polypeptide to which the anti-idiotype polypeptide is fused.

[0209] In some embodiments an anti-idiotype polypeptide, or the anti-idiotype extracellular recognition domain of an anti-idiotype polypeptide, is expressed as part of a fusion polypeptide. In some embodiments, the fusion polypeptide can be a fusion between the anti-idiotype polypeptide or the extracellular recognition domain of an anti-idiotype polypeptide and a first engineered signaling polypeptide, which are disclosed in more detail elsewhere herein. Thus, in some embodiments, the the anti-idiotype polypeptide or the extracellular recognition domain of an anti-idiotype polypeptide is fused to a lymphoproliferative element, CAR, and/or a recombinant TCR. In some embodiments, the the anti-idiotype polypeptide or the extracellular recognition domain of an anti-idiotype polypeptide is fused to a cytokine. In some embodiments, the fusion polypeptide can further include one or more of the other domains of the anti-idiotype polypeptides.

[0210] In some embodiments, the fusion polypeptide including an anti-idiotype polypeptide can further include a CAR. In some embodiments, the fusion polypeptide can include a recombinant TCR. In embodiments wherein the anti-idiotype polypeptide is fused to a CAR or a recombinant TCR, the extracellular recognition domain of the anti-idiotype polypeptide can be expressed as part of the antigen-specific binding region (ASTR, as discussed elsewhere herein) of the CAR (e.g., a bispecific antibody) or the antigen binding site of the recombinant TCR, or the extracellular recognition domain can be expressed as part of a separate domain on the fusion polypeptide. For example, the CAR and the extracellular recognition domain from the anti-idiotype polypeptide can each be one part of a bispecific antibody that is attached to the other domains of the fusion polypeptide.

[0211] In some embodiments, an anti-idiotype polypeptide, for example a safety switch or an activity modulator, is expressed fused to a lymphoproliferative element, to form a fusion polypeptide. Thus, in some embodiments, the fusion polypeptide can include a lymphoproliferative element. Such constructs provide the advantage, especially in combination with other “space saving” elements provided herein, of taking up less genomic space on an RNA genome compared to separate polypeptides. The lymphoproliferative element of a fusion polypeptide can be any of the lymphoproliferative elements disclosed elsewhere herein. In some embodiments, the lymphoproliferative element of the fusion polypeptide can include one or more or all of the domains, motifs, and/or mutations of the intracellular signaling domains disclosed herein or otherwise known to induce proliferation and/or survival of T cells and/or NK cells. In some embodiments, the lymphoproliferative element of a fusion polypeptide is constitutively active. In some embodiments, the lymphoproliferative element of a fusion polypeptide is an inducible lymphoproliferative element. In some such embodiments, binding of the target antibody or antibody mimetic to the extracellular recognition domain on the fusion polypeptide dimerizes two intracellular signaling domains of the inducible lymphoproliferative element to drive proliferation of cells such as T cells and/or NK cells. In some embodiments, the inducible lymphoproliferative element of a fusion polypeptide activates proliferative and/or survival signaling after binding of the anti-idiotype extracellular recognition domain to the target antibody or antibody mimetic, as also discussed in the “Activity modulators” section herein. In some embodiments, a fusion polypeptide that includes an inducible lymphoproliferative element can include a dimerization domain besides the anti-idiotype extracellular recognition domain. In illustrative embodiments, a fusion polypeptide that includes an inducible lymphoproliferative element does not include a dimerization domain besides the anti-idiotype extracellular recognition domain.

[0212] In one illustrative embodiment, an eTag is expressed as a fusion polypeptide, fused the 5′ terminus of the c-Jun domain (SEQ ID NO: 104), a transmembrane domain from CSF2RA (SEQ ID NO: 129), a first intracellular domain from MPL (SEQ ID NO:283), and a second intracellular domain from CD40 (SEQ ID NO:208). When expressed as a polypeptide not fused to a CAR or lymphoproliferative element, the cell tag may be associated with the cell membrane via its natural membrane attachment sequence or via a heterologous membrane attachment sequence such as a GPI-anchor or transmembrane sequence. In illustrative embodiments cell tags are expressed on the T cell and/or NK cell but are not expressed on the replication incompetent recombinant retroviral particles. In some embodiments, polynucleotides, polypeptides, and cells comprise 2 or more safety switches.

### Cell Formulations and Methods of Administration

[0213] In some embodiments such as embodiments in which the samples do not undergo a PBMC isolation or granulocyte depletion procedure, at least 5%, at least 10%, at least 20%, at least 25%, at least 30%, at least 40%, at least 50%, or at least 75% of the neutrophils, basophils, and/or eosinophils present in a blood sample that is subjected to a method for modifying herein, are present in the cell formulation, including at the time of the optional delivery (i.e., administering) step. In some embodiments such as those embodiments in which the samples do not undergo a B cell depletion procedure, at least 5%, at least 10%, at least 20%, at least 25%, at least 30%, at least 40%, at least 50%, or at least 75% of the B cells present in a blood sample that is subjected to a method for modifying herein, are present in the cell formulation, including at the time of the optional delivery step. In some embodiments such as those embodiments in which the samples do not undergo a monocyte depletion procedure, at least 5%, at least 10%, at least 20%, at least 25%, at least 30%, at least 40%, at least 50%, or at least 75% of the monocytes present in a blood sample that is subjected to a method for modifying herein, are present in the cell formulation, including at the time of the optional delivery step.

[0214] In some embodiments, and in illustrative embodiments in which the cell formulation is administered subcutaneously or intramuscularly, the volume of the cell formulation including the modified lymphocytes is less than traditional CAR-T methods, which typically are infusion-delivery methods, and can be less than, or less than about 1 ml, about 2 ml, about 3 ml, about 4 ml, about 5 ml, about 10 ml, about 15 ml, about 20 ml, or about 25 ml.

[0215] The short contacting time in certain embodiments results in many of the modified lymphocytes in cell formulations herein, having on their surfaces, binding polypeptides, fusogenic polypeptides, and in some embodiments T cell activation elements that originated on the surface of retroviral particles, either through association with the recombinant retroviral particles or by fusion of the retroviral envelopes with the plasma membranes, including at the time of the optional delivery step. In some embodiments, at least 10%, 15%, 20%, 25%, 30%, 35%, 40%, 45%, 50%, 55%, 60%, 65%, 70%, 75%, 80%, 85%, or 90% of the modified lymphocytes in the cell formulation include a pseudotyping element and/or a T cell activation element, e.g., a T cell activating antibody. In some embodiments, the pseudotyping element and/or T cell activation element can be bound to the surface of the modified lymphocytes through, for example, a T cell receptor, CD28, OX40, 4-1BB, ICOS, CD9, CD53, CD63, CD81, CD82, and/or the pseudotyping element and/or T cell activation element can be present in the plasma membrane of the modified lymphocytes.

[0216] Cell formulations are provided herein, that include for example T cells and/or NK cells. Such formulations, in illustrative embodiments are provided by methods provided herein. Any of the cell formulations provided herein can include self-driving CAR-T cells. In one aspect, provided herein is a cell formulation comprising a population of self-driving CAR-T cells, such as modified, genetically modified, transcribed, transfected, and/or stably integrated self-driving CAR-T cells in a delivery solution.

[0217] Due to the advantageously short time lymphocytes are contacted with recombinant nucleic acid vectors and modified lymphocytes are ex vivo after such contacting in some illustrative embodiments provided herein, in these embodiments some or all of the T and NK cells do not yet express the recombinant nucleic acid or have not yet integrated the recombinant nucleic acid into the genome of the cell, and some of the retroviral particles in embodiments including these, may be associated with, but may have not fused with the target cell membrane, before being used or included in any of the methods or compositions provided herein, including, but not limited to, being introduced or reintroduced back into a subject, or before being used to prepare a cell formulation. Thus, various cell formulation aspects and embodiments are provided herein that can be produced, for example, from these illustrative methods provided herein, such as for example, rapid point of care methods that in illustrative embodiments involve subcutaneous administration. Such cell formulations, including but not limited to those set out immediately below and in the Exemplary Embodiments section herein, can exist at the time of collection of cells after they are contacted with a recombinant retroviral vector and optionally rinsed, and can exist up to and including at the time of administration to a subject, in illustrative embodiments subcutaneously.

[0218] In some embodiments, provided herein are cell formulations comprising T cells and/or NK cells, wherein less than 90%, 80%, 75%, 70%, 60%, 50%, 40%, 30%, 25%, 20%, 10%, or 5% of the cells in the cell formulation are T cells and/or NK cells. In some embodiments, cell formulations comprising lymphocytes, NK cells, and/or T cells, are provided wherein at least 4%, 5%, 10%, 15%, 20%, 25%, 30%, 35%, 40%, 45%, 50%, 55%, 60%, 65%, 70%, 75%, 80%, 85%, 90%, or 95% of the lymphocytes, NK cells, and/or in illustrative embodiments T cells in the cell formulation are modified cells, for example, modified with polynucleotides comprising nucleic acids that encode anti-idiotype polypeptides provided herein. Such polynucleotides can optionally encode a CAR, TCR, inhibitory RNA, or LE, as provided herein. In some embodiments, between 4%, 5%, 10%, 15%, 20%, 25%, 30%, 35%, 40%, 45%, 50%, 55%, 60%, 65%, and 70% of the lymphocytes are modified on the low end of the range and 10%, 15%, 20%, 25%, 30%, 35%, 40%, 45%, 50%, 55%, 60%, 65%, 70%, 75%, 80%, 85%, 90%, and 95% of the lymphocytes are modified cells on the high end of the range, for example between 5% and 95%, 10% and 90%, 25% and 75%, and 25% and 95%. In some embodiments, at least 5%, 10%, 15%, 20%, 25%, 30%, 35%, 40%, 45%, 50%, 55%, 60%, 65%, 70%, 75%, 80%, 85%, 90%, 95%, 96%, 97%, 98%, 99%, or all of the modified lymphocytes within the cell formulation are not genetically modified, transduced, or stably transfected. In some embodiments, between 5%, 10%, 15%, 20%, 25%, 30%, 35%, 40%, 45%, 50%, 55%, 60%, 65%, and 70% of the modified lymphocytes are not genetically modified, transduced, or stably transfected on the low end of the range and 10%, 15%, 20%, 25%, 30%, 35%, 40%, 45%, 50%, 55%, 60%, 65%, 70%, 75%, 80%, 85%, 90%, 95%, 96%, 97%, 98%, and 99% or all of the modified lymphocytes are not genetically modified, transduced, or stably transfected on the high end of the range, for example between 5% and 95%, 10% and 90%, 25% and 75%, and 25% and 95%. In some embodiments, the polynucleotide of genetically modified lymphocytes can be either extrachromosomal or integrated into the genome in these cell formulations that are formed after contacting and incubation, and at the time of optional administration. In some embodiments of these cell formulations, at least 5%, 10%, 15%, 20%, 25%, 30%, 35%, 40%, 45%, 50%, 55%, 60%, 65%, 70%, 75%, 80%, 85%, 90%, 95%, 96%, 97%, 98%, 99%, or all of the genetically modified lymphocytes have an extrachromosomal polynucleotide. In some embodiments, between 5%, 10%, 15%, 20%, 25%, 30%, 35%, 40%, 45%, 50%, 55%, 60%, 65%, and 70% of the modified or genetically modified lymphocytes have an extrachromosomal polynucleotide on the low end of the range and 10%, 15%, 20%, 25%, 30%, 35%, 40%, 45%, 50%, 55%, 60%, 65%, 70%, 75%, 80%, 85%, 90%, 95%, 96%, 97%, 98%, and 99% or all of the modified or genetically modified lymphocytes have an extrachromosomal polynucleotide on the high end of the range, for example between 5% and 95%, 10% and 90%, 25% and 75%, and 25% and 95%. In some embodiments, at least 5%, 10%, 15%, 20%, 25%, 30%, 35%, 40%, 45%, 50%, 55%, 60%, 65%, 70%, 75%, 80%, 85%, 90%, 95%, 96%, 97%, 98%, 99%, or all of the modified or genetically modified lymphocytes are not transduced or stably transfected in these cell formulations, for example as a result of methods for genetically modifying T cells and/or NK cells provided herein. In some embodiments, between 5%, 10%, 15%, 20%, 25%, 30%, 35%, 40%, 45%, 50%, 55%, 60%, 65%, and 70% of the modified or genetically modified lymphocytes are not transduced on the low end of the range and 10%, 15%, 20%, 25%, 30%, 35%, 40%, 45%, 50%, 55%, 60%, 65%, 70%, 75%, 80%, 85%, 90%, 95%, 96%, 97%, 98%, and 99% or all of the modified or genetically modified lymphocytes are not transduced or stably transfected on the high end of the range, for example between 5% and 95%, 10% and 90%, 25% and 75%, and 25% and 95%.

[0219] . Not to be limited by theory, unlike traditional CAR-T cell processing methods where cells are cultured ex-vivo for days or weeks and many cell divisions, in illustrative methods provided herein where T cells and/or NK cells are contacted with retroviral particles to modify the T cells and/or N cells within hours of delivery, some or most of the reverse transcriptase and integrase present within the retroviral particles that moves into a T cell and/or NK cell after it fuses with a retroviral particle, would still be present in the modified T cells and/or NK cells at the time of delivery.

[0220] The volume of cell formulation or other solution administered varies depending on the route of administration, as provided elsewhere herein. Cell formulations injected subcutaneously or intramuscularly typically have smaller volumes than those delivered via infusion. In some embodiments, the volume of the cell formulation or other solution including a suspension of the modified, and in illustrative embodiments genetically modified lymphocytes is not more than 1 ml, 2 ml, 3 ml, 4 ml, 5 ml, 10 ml, 15 ml, 20 ml, 25 ml, 30 ml, 35 ml, 40 ml, 45 ml, or 50 ml. In some embodiments, the volume of the cell formulation or other solution including a suspension of the modified lymphocytes can be between 0.20 ml, 0.25 ml, 0.5 ml, 1 ml, 2 ml, 3 ml, 4 ml, 5 ml, 10 ml, 15 ml, 20 ml, or 25 ml on the low end of the range and 0.5 ml, 1 ml, 2 ml, 3 ml, 4 ml, 5 ml, 10 ml, 15 ml, 20 ml, 25 ml, 30 ml, 35 ml, 40 ml, 45 ml, or 50 ml., 30 ml, 35 ml, 40 ml, 45 ml, 50 ml, 75 ml, 100 ml, 125 ml, 250 ml, 500 ml, or 1000 ml on the high end of the range. Thus, as non-limiting examples, the volume can be between 0.2 ml and 10 ml, 0.5 ml and 10 ml, 0.5 and 2 ml, 1 ml and 250 ml, 1 ml and 100 ml, 10 ml and 100 ml, or 1 ml and 10 ml. In certain illustrative embodiments, less than 10 ml, between 1 ml and 25 ml, and in illustrative embodiments between 1 ml and 3 ml, between 1 ml and 5 ml, or between 1 ml and 10 ml of a cell formulation that includes modified lymphocytes in delivery solution are administered subcutaneously or intramuscularly. In illustrative embodiments, the volume of the solution including the modified lymphocytes can be between 0.20 ml, 0.25 ml, 0.5 ml, 1 ml, 2 ml, 3 ml, 4 ml, and 5 ml on the low end of the range and 0.5 ml, 1 ml, 2 ml, 3 ml, 4 ml, 5 ml, 10 ml, 15 ml, 20 ml, 25 ml, 30 ml, 35 ml, 40 ml, 45 ml, and 50 ml on the high end of the range. In an exemplary embodiment, a 70 kg subject is dosed at 1.0 × 10⁶ T cells/kg by administering 1 ml of a delivery formulation of T cells at 7.0 × 10⁷ cells/ml subcutaneously. In some embodiments, the solution can include hyaluronidase when the volume of the solution is at least 2 ml, 3 ml, 4 ml, 5 ml, 10 ml, 15 ml, 20 ml, or 25 ml. In embodiments herein wherein lymphocytes are filtered especially after they are modified, and/or especially where transduction is performed on top of a filter, the delivery solution can be used to resuspend and/or elute cells from the filter in volumes that can be those provided above. As such, in some embodiments, a delivery solution provided herein is an elution solution.

[0221] In some embodiments, modified and in illustrative embodiments genetically modified lymphocytes are introduced or reintroduced into the subject by intradermal, intratumoral or intramuscular administration and in illustrative embodiments, subcutaneous administration using a cell formulation present in a subcutaneous delivery device, such as a sterile syringe that is adapted to deliver a solution subcutaneously. In some embodiments, a subcutaneous delivery device is used that holds a solution (e.g., a cell formulation herein) and has an open or openable end, which in illustrative embodiments is the open end of a needle, for administrating the solution (e.g., cell formulation) subcutaneously from the liquid holding portion of the device. Such subcutaneous delivery device is effective for, and in illustrative embodiments adapted for subcutaneous delivery, or effective to inject subcutaneously or adapted to inject subcutaneously. Non-limiting examples of subcutaneous delivery devices that are adapted to deliver a solution subcutaneously include subcutaneous catheters, such as indwelling subcutaneous catheters, such as for example, the Insuflon® (Becton Dickinson) and needless closed indwelling subcutaneous catheter systems, for example with wings, such as for example, the Saf-T-Intima® (Becton Dickinson). In some embodiments, the delivery device can include a pump, for example an infusion pump or a peristaltic pump. In some embodiments, the cell formulation is fluidly connected to any of the needles disclosed herein, for example a needle compatible with, effective for, adapted for, or adapted to deliver subcutaneously or effective to deliver subcutaneously

[0222] In some embodiments the delivery solution, a composition in the kit, or the cell formulation includes one or more cytokines such as IL-2, IL-7, IL-15, or IL-21, IL-21 and/or cytokine receptor agonists, such as an IL-15 agonist. In some embodiments the cytokine does not bind to a cytokine receptor included in the delivery solution, kit, or cell formulation; and/or does not bind to a cytokine receptor that is encoded by a polynucleotide in the delivery solution, cell formulation, or kit. In some embodiments, the cytokines can be modified cytokines that, not to be limited by theory, selectively activate complexes that drive proliferation. In illustrative embodiments, the modified cytokine is a modified IL-2, for example, a fusion protein with a circularly-permuted IL-2 with the extracellular domain of IL-2Rα (see, e.g., Lopes et al, J Immunother Cancer 2020 Apr; 8(1): e000673). In some embodiments, the cytokines, modified cytokines, or cytokine receptor agonists can also be administered in one or administrations separate from the cell formulation, before, contemporaneous to, or after the administration including the delivery solution or cell formulation. In some embodiments, two or more separate administrations can be in escalating doses. In some embodiments, two or more administrations can be at the same dose. In some embodiments, two or more administrations can include the same or different cytokines, modified cytokines, and or cytokine receptor agonists. In some embodiments, the separate administrations can be a series of 2, 3, 4, 5, 6, 7, 8, 9, 10, 11, 12, 13, 14, 15, 16, 17, 18, 19, 20, or 21 administrations. In some embodiments, the separate administrations occur on consecutive days.

[0223] In illustrative embodiments, cells in a first cell mixture, for example cells obtained from a subject, are modified with a recombinant nucleic acid vector encoding a target antigen, which can be referred to herein as “artificial antigen presenting cells” or “aAPCs”, and cells in a separate second cell mixture from the same subject are modified to express the CAR that binds the antigen. In some embodiments, where the modified cell that was modified with a vector encoding a target antigen is a T cell, the cell can be called a “T-APC” herein. Such modified T-APCs can include, as non-limiting examples, B cells, dendritic cells, and macrophages, and in illustrative embodiments dendritic cells and macrophages such as where a corresponding CAR-T target is a B cell cancer target, and can be generated using methods provided herein where reaction mixtures for modification (e.g., transduction) include a T cell binding polypeptide, such as a polypeptide directed to CD3. In further illustrative embodiments, the cell mixture is whole blood, isolated TNCs, isolated PBMCs. For example, the first cell mixture can be modified with a recombinant nucleic acid vector encoding a fusion protein of the extracellular domain of Her2 and the transmembrane domain of PDGF and the second cell mixture can be modified with a recombinant nucleic acid vector encoding a CAR directed to HER2. The cells can then be formulated into the delivery solution or otherwise administered to the subject at varying CAR effector cell-to-target-cell ratios. In some embodiments, the effector-to-target ratio at the time of formulation or administration is, or is about 10:1, about 9:1, about 8:1, about 7:1, about 6:1, about 5:1, about 4:1, about 3:1, about 2;1, about 1:1, about 1:2, about 1:3, about 1:5, about 1:6, about 1:7, about 1:8, about 1:9, or about 1:10. In illustrative embodiments, target cells are co-administered with the modified T and/or NK cells subcutaneously or intramuscularly.

### Synthetic RNA

[0224] Provided herein in another aspect, the delivery solution or the cell formulation includes synthetic RNA. In some embodiments the synthetic RNA includes inhibitory RNAs such as siRNAs directed to one or more targets. The targets for these inhibitory RNAs can be any of the targets for siRNAs or miRNAs disclosed elsewhere herein. In some embodiments, the synthetic RNA includes mRNA encoding for one or more proteins or peptides. In some embodiments, the mRNA encodes for one or more CARs. The CARs may be any CAR composition disclosed herein, including bispecific CARs that include an anti-id ERD as disclosed herein. In some embodiments, the mRNA can encode any anti-idiotype polypeptide disclosed herein. In some embodiments, the mRNA encodes for the target antibody to an anti-idiotype polypeptide disclosed herein. Such embodiment can have an advantage of providing a target antibody that can be cytotoxic when delivered in soluble form, but less or not cytotoxic when taken up by cells after in vivo administration of an mRNA encoding the target antibody. Thus, cells that take up and express the target antibody can become artificial antigen presenting cells for embodiments where the anti-idiotype polypeptide has an ICD that is the ICD of an LE, or of a CAR (e.g. a bi-speficic CAR).

[0225] In some embodiments, the mRNA encodes for one or more cytokines. In some embodiments, mRNA encodes for IL-2 or a functional variant thereof. In some embodiments, the mRNA encodes for IL-7 or a functional variant thereof. In some embodiments, the mRNA encodes for IL-15 or a functional variant thereof. In some embodiments, the mRNA encodes for IL-21 or a functional variant thereof. In some embodiments, the mRNA encodes one or more proteins or polypeptides that bind and activate a CAR. In some embodiments, the mRNA encodes for an antigen recognized by the ASTR of the CAR. In some embodiments, the mRNA encodes for HER2 or an extracellular domain of HER2. In some embodiments, the mRNA encodes for EGFR or an extracellular domain of EGFR. In some embodiments, the mRNA encodes for Axl or an extracellular domain of Axl. In some embodiments, the mRNA encodes for CD19 or an extracellular domain of CD19. In some embodiments, the mRNA encodes for CD22 or an extracellular domain of CD22. In some embodiments, the mRNA encodes for an antibody recognized by the ASTR of the CAR. In some embodiments, the MRNA encoding for an antibody recognized by the ASTR of the CAR is an anti-idiotype antibody directed to the antibody or scFv of the ASTR. In some embodiments, the mRNA encodes for an antibody that binds an epitope tag of the CAR and can cross-link two CARs as described elsewhere herein. In some embodiments, the mRNA encodes for one or more T and/or NK cell co-stimulatory proteins. Such co-stimulatory proteins may comprise one or more ligands or antibodies to a co-stimulatory receptor on T and/or NK cells. In some embodiments the co-stimulatory receptor is CD28. In some embodiments the co-stimulatory receptor is 4-1BB. In some embodiments, the mRNA encodes a protein or polypeptide that is soluble. In some embodiments, the mRNA encodes a protein or polypeptide that is membrane-bound. In some embodiments, the membrane-bound protein or polypeptide is operatively linked to a transmembrane domain. In some embodiments, the synthetic RNA includes both inhibitory RNAs such as siRNAs directed to one or more targets and mRNA encoding for one or more proteins or peptides.

[0226] A method for generating mRNA for use in the delivery solution or cell formulation may involve in vitro transcription of a template with specially designed primers, followed by PolyA addition, to produce a construct containing 3′ and 5′ untranslated sequence, a 5′ cap and/or IRES, the nucleic acid to be expressed, and a polyA tail, typically 50-200 bases in length. In some embodiments, the synthetic RNA is a naturally occurring, endogenous RNA for the nucleic acid of interest. In some embodiments, the RNA is not the naturally occurring, endogenous RNA for the nucleic acid of interest. In some embodiments, the RNA is modified to change the stability and/or translation efficiency of the RNA. In some embodiments, the 5′ UTR, 3′UTR, Kozak sequence, polyA tail is modified. In some embodiments, the RNA includes a 5′ cap. In some embodiments, the RNA is encapsulated in lipid-based carrier vehicles. One approach for assembling lipid nanocarriers includes directly mixing of a solution of lipids in ethanol with an aqueous solution of the nucleic acid to obtain lipid nanoparticles (LNPs). In some embodiments, the LNPs comprise PEG-conjugated lipid. PEG conjugated lipids prevent the aggregation during particle formation and allow the controlled manufacturing of particles with defined diameters in the range between approximately 50 nm and 150 nm. PEGylation of nanoparticles can have substantial disadvantages concerning safety and activity. The drawbacks associated with the use of PEGylated nanoparticles has stimulated the development of PEG alternatives. In some embodiments the LNPs do not comprise PEG. In some embodiments, the LNPs comprise poly(glycerol) (PGs), poly(oxazolines), sugar-based systems, and poly(peptides). In some embodiments, the polypeptides include polysarcosine (pSAR). In some embodiments, the LNPs comprise a dendritic cell targeting moiety. In some embodiments, the dendritic cell targeting moiety comprises mannose.

[0227] In some embodiments, the RNA can be added to a cell formulation comprising, or co-administered with, modified and/or genetically modified T cells and/or NK cells in cell formulations and methods provided herein. In some embodiments, the RNA is added to the isolated blood of a subject and processed in parallel with the T cells and/or NK cells. In some embodiments, the RNA can be formulated separately from the modified and/or genetically modified T cells and/or NK cells. The synthetic RNA may be delivered by any means known in the art for therapeutic delivery of RNA. In some embodiments, the RNA is delivered intravenously. In some embodiments, the RNA is delivered intraperitoneally. In some embodiments, the RNA is delivered intramuscularly. In some embodiments, the RNA is delivered intratumorally. In some embodiments, the RNA is delivered intradermally. In illustrative embodiments, the RNA is delivered subcutaneously. In some embodiments, the RNA is delivered at the same site as the site of administration of the modified and/or genetically modified T cells and/or NK cells. In some embodiments, the RNA is delivered at a site adjacent to the site of administration of the modified and/or genetically modified T cells and/or NK cells. In some embodiments, the RNA is administered once. In some embodiments, the RNA is administered, 2, 3, 4, 5, 6 or more times.

### Recombinant Retroviral Particles

[0228] Recombinant retroviral particles are disclosed in methods and compositions provided herein, for example, to modify cells, as non-limiting examples human cells, primary cells, T cells and/or NK cells to make genetically modified and/or transduced cells, human cells, primary cells, T cells and/or NK cells. The recombinant retroviral particles are themselves aspects of the present invention. Typically, the recombinant retroviral particles included in aspects provided herein, are replication incompetent, meaning that a recombinant retroviral particle cannot replicate once it leaves the packaging cell. In fact, unless indicated otherwise herein, retroviral particles are replication incompetent, and if such retroviral particles include nucleic acids in their genome that are not native to the retrovirus, they are “recombinant retroviral particles.” In illustrative embodiments, the recombinant retroviral particles are lentiviral particles.

[0229] Provided herein in some aspects are replication incompetent recombinant retroviral particles for use in transducing cells, typically lymphocytes and illustrative embodiments T cells and/or NK cells. The replication incompetent recombinant retroviral particles can include an envelope protein. In some embodiments, the envelope protein can be a pseudotyping element. In some embodiments, the envelope protein can be an activation element. In some embodiments, the replication incompetent recombinant retroviral particles include both a pseudotyping element and an activation element. The replication incompetent recombinant retroviral particles can include any of the pseudotyping elements discussed elsewhere herein. In some embodiments, the replication incompetent recombinant retroviral particles can include any of the activation elements discussed elsewhere herein. In one aspect, provided herein is a replication incompetent recombinant retroviral particle (RIP) that includes a polynucleotide with nucleic acids that encode an anti-idiotype polypeptide provided in any of the aspects and embodiments herein. Such polypeptide typically includes nucleic acids that further encode at least one of a CAR, and LE, an inhibitory RNA, and a cytokine. In some embodiments, the RIP includes a polynucleotide including: A. one or more transcriptional units operatively linked to a promoter active in T cells and/or NK cells, wherein the one or more transcriptional units encode an anti-idiotype polypeptide, and one or more of an engineered T cell receptor or a chimeric antigen receptor (CAR); and B. a pseudotyping element and a T cell activation element on its surface, wherein the T cell activation element is not encoded by a polynucleotide in the replication incompetent recombinant retroviral particle. In some embodiments, the T cell activation element can be any of the activation elements discussed elsewhere herein. In illustrative embodiments, the T cell activation element can be anti-CD3 scFvFc. In another aspect, provided herein is a RIP, including a polynucleotide including one or more transcriptional units operatively linked to a promoter active in T cells and/or NK cells, wherein the one or more transcriptional units encode an anti-idiotype polypeptide and a first signaling polypeptide including an engineered T cell receptor or a chimeric antigen receptor (CAR) and a second signaling polypeptide including a lymphoproliferative element. In some embodiments, the lymphoproliferative element can be a chimeric lymphoproliferative element. In some embodiments of any of the retroviral particle aspects or embodiments provided herein, or any other aspect that includes a retroviral particle, the anti-idiotype polypeptide, engineered T cell receptor, CAR, or other transgene is expressed, displayed, and/or otherwise incorporated in the surface of the replication incompetent retroviral particle at a reduced level that is less than 70%, 60%, 50%, 40%, 30%, 20%, 10%, or 5% of the surface expression compared to when the transgene is expressed from an EF1-a or PGK promoter, and in illustrative embodiments, when the transgene is expressed from an EF1-a or PGK promoter in the absence of additional elements (such as degrons or inhibitory RNAs) to reduce such surface expression. In illustrative embodiments of any of the polynucleotide vector (e.g. RIP) aspects provided herein, or any other aspect that includes a gene vector, the gene vector is substantially free of the protein transcript encoded by nucleic acid of the gene vector, and/or the RIPs do not express or comprise a detectable amount of the engineered T cell receptor or CAR on their surface, or express or comprise a reduced amount of the engineered T cell receptor or CAR on their surface.

[0230] Various elements and combinations of elements that are included in RIPs are provided throughout this disclosure, such as, for example, pseudotyping elements, activation elements, and membrane bound cytokines, as well as nucleic acid sequences that are included in a genome of a replication incompetent, recombinant retroviral particle such as, but not limited to, nucleic acid sequences encoding an anti-idiotype polypeptide, nucleic acid sequences encoding a CAR; nucleic acid sequences encoding a lymphoproliferative element; nucleic acids encoding a cytokine; nucleic acid sequences encoding a control element, such as a riboswitch; a promoter, especially a promoter that is constitutively active or inducible in a T cell; and nucleic acids encoding an inhibitory RNA molecule. Furthermore, various aspects provided herein, such as methods of making recombinant retroviral particles, methods for performing adoptive cell therapy, and methods for transducing T cells, produce and/or include replication incompetent, recombinant retroviral particles. Replication incompetent recombinant retroviruses that are produced and/or included in such methods themselves form separate aspects of the present invention as replication incompetent, recombinant retroviral particle compositions, which can be in an isolated form. Such compositions can be in dried down (e.g., lyophilized) form or can be in a suitable solution or medium known in the art for storage and use of retroviral particles.

[0231] Recombinant retroviral particle embodiments herein include those wherein the retroviral particle comprises a genome that includes one or more nucleic acids encoding an anti-idiotype polypeptide and one or more inhibitory RNA molecules. Various alternative embodiments of such nucleic acids that encode inhibitory RNA molecules that can be included in a genome of a retroviral particle, including combinations of such nucleic acids with other nucleic acids that encode a CAR or a lymphoproliferative element other than an inhibitory RNA molecule, are included for example, in the inhibitory RNA section provided herein, as well as in various other paragraphs that combine these embodiments. Furthermore, various alternatives of such replication incompetent recombinant retroviruses can be identified by exemplary nucleic acids that are disclosed within packaging cell line aspects disclosed herein. A skilled artisan will recognize that disclosure in this section of a recombinant retroviral particle that includes a genome that encodes one or more (e.g., two or more) inhibitory RNA molecules, can be combined with various alternatives for such nucleic acids encoding inhibitory RNA molecules provided in other sections herein. Furthermore, a skilled artisan will recognize that such nucleic acids encoding one or more inhibitory RNA molecules can be combined with various other functional nucleic acid elements provided herein, as for example, disclosed in the section herein that focuses on inhibitory RNA molecules and nucleic acid encoding these molecules. In addition, the various embodiments of specific inhibitory RNA molecules provided herein in other sections can be used in recombinant retroviral particle aspects of the present disclosure.

[0232] Necessary elements of recombinant retroviral vectors, such as lentiviral vectors, are known in the art. These elements are included in the packaging cell line section and in details for making replication incompetent, recombinant retroviral particles provided in the Examples section and as illustrated in WO2019/055946. For example, lentiviral particles typically include packaging elements REV, GAG and POL, which can be delivered to packaging cell lines via one or more packaging plasmids, a pseudotyping element, various examples which are provided herein, which can be delivered to a packaging cell line via a pseudotyping plasmid, and a genome, which is produced by a polynucleotide that is delivered to a host cell via a transfer plasmid. This polynucleotide typically includes the viral LTRs and a psi packaging signal. The 5′ LTR can be a chimeric 5′ LTR fused to a heterologous promoter, which includes 5′ LTRs that are not dependent on Tat transactivation. The transfer plasmid can be self-inactivating, for example, by removing a U3 region of the 3′ LTR. In some non-limiting embodiments, Vpu, such as a polypeptide comprising Vpu (sometimes called a “Vpu polypeptide” herein) including but not limited to, Src-FLAG-Vpu, is packaged within the retroviral particle for any composition or method aspect and embodiment provided herein that includes a retroviral particle. In some non-limiting embodiments, Vpx, such as Src-FLAG-Vpx, is packaged within the retroviral particle. Not to be limited by theory, upon transduction of a T cells, Vpx enters the cytosol of the cells and promotes the degradation of SAMHD1, resulting in an increased pool of cytoplasmic dNTPs available for reverse transcription. In some non-limiting embodiments, Vpu and Vpx is packaged within the retroviral particle for any composition or method aspect and embodiment that includes a retroviral particle provided herein.

[0233] Retroviral particles (e.g., lentiviral particles) included in various aspects of the present invention are in illustrative embodiments, replication incompetent, especially for safety reasons for embodiments that include introducing cells transduced with such retroviral particles into a subject. When replication incompetent retroviral particles are used to transduce a cell, retroviral particles are not produced from the transduced cell. Modifications to the retroviral genome are known in the art to assure that retroviral particles that include the genome are replication incompetent. However, it will be understood that in some embodiments for any of the aspects provided herein, replication competent recombinant retroviral particles can be used.

[0234] A skilled artisan will recognize that the functional elements discussed herein can be delivered to packaging cells and/or to T cells using different types of vectors, such as expression vectors. Illustrative aspects of the invention utilize retroviral vectors, and in some particularly illustrative embodiments lentiviral vectors. Other suitable expression vectors can be used to achieve certain embodiments herein. Such expression vectors include, but are not limited to, viral vectors (e.g. viral vectors based on vaccinia virus; poliovirus; adenovirus (see, e.g., Li et al., Invest Opthalmol Vis Sci 35:2543 2549, 1994; Borras et al., Gene Ther 6:515 524, 1999; Li and Davidson, PNAS 92:7700 7704, 1995; Sakamoto et al., H Gene Ther 5:1088 1097, 1999; WO 94/12649, WO 93/03769; WO 93/19191; WO 94/28938; WO 95/11984 and WO 95/00655); adeno-associated virus (see, e.g., Ali et al., Hum Gene Ther 9:81 86, 1998, Flannery et al., PNAS 94:6916 6921, 1997; Bennett et al., Invest Opthalmol Vis Sci 38:2857 2863, 1997; Jomary et al., Gene Ther 4:683 690, 1997, Rolling et al., Hum Gene Ther 10:641 648, 1999; Ali et al., Hum Mol Genet 5:591 594, 1996; Srivastava in WO 93/09239, Samulski et al., J. Vir. (1989) 63:3822-3828; Mendelson et al., Virol. (1988) 166:154-165; and Flotte et al., PNAS (1993) 90: 10613-10617); SV40; herpes simplex virus; or a retroviral vector (e.g., Murine Leukemia Virus, spleen necrosis virus, and vectors derived from retroviruses such as Rous Sarcoma Virus, Harvey Sarcoma Virus, avian leukosis virus, human immunodeficiency virus, myeloproliferative sarcoma virus, and mammary tumor virus), for example a gamma retrovirus; or human immunodeficiency virus (see, e.g., Miyoshi et al., PNAS 94:10319 23, 1997; Takahashi et al., J Virol 73:7812 7816, 1999); and the like.

[0235] As disclosed herein, replication incompetent recombinant retroviral particles are a common tool for gene delivery (Miller, Nature (1992) 357:455-460). The ability of replication incompetent recombinant retroviral particles to deliver an unrearranged nucleic acid sequence into a broad range of rodent, primate and human somatic cells makes replication incompetent recombinant retroviral particles well suited for transferring genes to a cell. In some embodiments, the replication incompetent recombinant retroviral particles can be derived from the Alpharetrovirus genus, the Betaretrovirus genus, the Gammaretrovirus genus, the Deltaretrovirus genus, the Epsilonretrovirus genus, the Lentivirus genus, or the Spumavirus genus. There are many retroviruses suitable for use in the methods disclosed herein. For example, murine leukemia virus (MLV), human immunodeficiency virus (HIV), equine infectious anaemia virus (EIAV), mouse mammary tumor virus (MMTV), Rous sarcoma virus (RSV), Fujinami sarcoma virus (FuSV), Moloney murine leukemia virus (Mo-MLV), FBR murine osteosarcoma virus (FBR MSV), Moloney murine sarcoma virus (Mo-MSV), Abelson murine leukemia virus (A-MLV), Avian myelocytomatosis virus-29 (MC29), and Avian erythroblastosis virus (AEV) can be used. A detailed list of retroviruses may be found in Coffin et al (“Retroviruses” 1997 Cold Spring Harbor Laboratory Press Eds: J M Coffin, S M Hughes, H E Varmus pp 758-763). Details on the genomic structure of some retroviruses may be found in the art. By way of example, details on HIV may be found from the NCBI Genbank (i.e., Genome Accession No. AF033819).

[0236] In illustrative embodiments, the replication incompetent recombinant retroviral particles can be derived from the Lentivirus genus. In some embodiments, the replication incompetent recombinant retroviral particles can be derived from HIV, SIV, or FIV. In further illustrative embodiments, the replication incompetent recombinant retroviral particles can be derived from the human immunodeficiency virus (HIV) in the Lentivirus genus. Lentiviruses are complex retroviruses which, in addition to the common retroviral genes gag, pol and env, contain other genes with regulatory or structural function. The higher complexity enables the lentivirus to modulate the life cycle thereof, as in the course of latent infection. A typical lentivirus is the human immunodeficiency virus (HIV), the etiologic agent of AIDS. in vivo, HIV can infect terminally differentiated cells that rarely divide, such as lymphocytes and macrophages.

[0237] In illustrative embodiments, replication incompetent recombinant retroviral particles provided herein contain Vpx polypeptide.

[0238] In some embodiments, replication incompetent recombinant retroviral particles provided herein comprise and/or contain Vpu polypeptide.

[0239] In illustrative embodiments, a retroviral particle is a lentiviral particle. Such retroviral particle typically includes a retroviral genome within a capsid which is located within a viral envelope.

[0240] In some embodiments, DNA-containing viral particles are utilized instead of recombinant retroviral particles. Such viral particles can be adenoviruses, adeno-associated viruses, herpesviruses, cytomegaloviruses, poxviruses, avipox viruses, influenza viruses, vesicular stomatitis virus (VSV), or Sindbis virus. A skilled artisan will appreciate how to modify the methods disclosed herein for use with different viruses and retroviruses, or retroviral particles. Where viral particles are used that include a DNA genome, a skilled artisan will appreciate that functional units can be included in such genomes to induce integration of all or a portion of the DNA genome of the viral particle into the genome of a T cell transduced with such virus.

[0241] In some embodiments, the HIV RREs and the polynucleotide region encoding HIV Rev can be replaced with N-terminal RGG box RNA binding motifs and a polynucleotide region encoding ICP27. In some embodiments, the polynucleotide region encoding HIV Rev can be replaced with one or more polynucleotide regions encoding adenovirus E1B 55-kDa and E4 Orf6.

[0242] In certain aspects, replication incompetent recombinant retroviral particles can include nucleic acids encoding a self-driving CAR, as disclosed elsewhere herein. As a non-limiting example, such embodiments are retroviral particles whose genome comprises one or more first transcriptional units operably linked to an inducible promoter inducible in at least one of a T cell or an NK cell, and one or more second transcriptional units operably linked to a constitutive T cell or NK cell promoter, wherein the number of nucleotides between the 5′ end of the one or more first transcriptional units and the 5′ end of the one or more second transcriptional units is less than the number of nucleotides between the 3′ end of the one or more first transcriptional units and the 3′ end of the one or more second transcriptional units,
[0243] a. wherein at least one of the one or more first transcriptional units encodes a lymphoproliferative element,
[0244] b. and wherein at least one of the one or more second transcriptional units encodes a first chimeric antigen receptor (CAR), wherein the CAR comprises an antigen-specific targeting region (ASTR), a transmembrane domain, and an intracellular activating domain, and wherein nucleic acids within the first transcriptional unit or the second transcriptional unit encode an anti-idiotype polypeptide according to an of the embodiments provided herein.

[0245] In some embodiments, the replication incompetent recombinant retroviral particles can further display a T cell activation element.

[0246] Not to be limited by theory, T cells contacted and transduced with these replication incompetent recombinant retroviral particles that include nucleic acids encoding a self-driving CAR, can receive an initial boost of transcription from the CAR-stimulated inducible promoters as the T cell activation element can stimulate the inducing signal of the CAR-stimulated inducible promoters. The binding of the T cell activation element can induce the calcium ion influx that results in dephosphorylation of NFAT and its subsequent nuclear translocation and binding to NFAT-responsive promoters. The lymphoproliferative elements transcribed and translated from these CAR-stimulated inducible promoters can give an initial increase in proliferation to these cells. In illustrative embodiments, the T cell activation element can be a membrane-bound anti-CD3 antibody, and can be GPI-linked or otherwise displayed on virus. In some embodiments, the membrane-bound anti-CD3 antibody can be fused to a viral envelope protein, such as MuLV, VSV-G, a Henipavirus-G such as NiV-G, or variants and fragments thereof.

[0247] In some embodiments, the isolated replication incompetent retroviral particles are a large-scale batch contained in a large-scale container. Such large-scale batch can have titers, for example of 10⁶ - 10⁸ TU/ml and a total batch size of between 1×10¹⁰ TU and 1×10¹³ TU, 1×10¹¹ TU and 1×10¹³ TU, lx10¹² TU and 1×10¹³ TU, 1×10¹⁰ TU and 5×10¹² TU, or 1×10¹¹ TU and 5×10¹² TU. In illustrative embodiments, retroviral particles for any aspect or embodiment provided herein are substantially pure, as discussed in more detail herein.

### Retroviral Genome Size

[0248] In the methods and compositions provided herein, the recombinant retroviral genomes, in non-limiting illustrative examples, lentiviral genomes, have a limitation to the number of polynucleotides that can be packaged into the viral particle. In some embodiments provided herein, the polypeptides encoded by the polynucleotide encoding region can be truncations or other deletions that retain a functional activity such that the polynucleotide encoding region is encoded by less nucleotides than the polynucleotide encoding region for the wild-type polypeptide. In some embodiments, the polypeptides encoded by the polynucleotide encoding region can be fusion polypeptides that can be expressed from one promoter. In some embodiments, the fusion polypeptide can have a cleavage signal to generate two or more functional polypeptides from one fusion polypeptide and one promoter. Furthermore, some functions that are not required after initial ex vivo transduction are not included in the retroviral genome, but rather are present on the surface of the replication incompetent recombinant retroviral particles via the packaging cell membrane. These various strategies are used herein to maximize the functional elements that are packaged within the replication incompetent recombinant retroviral particles. In some embodiments, the recombinant retroviral genome to be packaged can be between 1,000, 2,000, 3,000, 4,000, 5,000, 6,000, 7,000, and 8,000 nucleotides on the low end of the range and 2,000, 3,000, 4,000, 5,000, 6,000, 7,000, 8,000, 9,000, 10,000, and 11,000 nucleotides on the high end of the range. The retroviral genome to be packaged includes one or more polynucleotide regions encoding a first and second engineering signaling polypeptide as disclosed in detail herein. In some embodiments, the recombinant retroviral genome to be packaged can be less than 5,000, 6,000, 7,000, 8,000, 9,000, 10,000, or 11,000 nucleotides. Functions discussed elsewhere herein that can be packaged include required retroviral sequences for retroviral assembly and packaging, such as a retroviral rev, gag, and pol coding regions, as well as a 5′ LTR and a 3′ LTR, or an active truncated fragment thereof, a nucleic acid sequence encoding a retroviral cis-acting RNA packaging element, and a cPPT/CTS element. Furthermore, in illustrative embodiments a replication incompetent recombinant retroviral particle herein can include any one or more or all of the following, in some embodiments in reverse orientation with respect to a 5′ to 3′ orientation established by the retroviral 5′ LTR and 3′ LTR (as illustrated in WO2019/055946 as a non-limiting example): one or more polynucleotide regions encoding a first and second engineering signaling polypeptide, at least one of which includes at least one lymphoproliferative element; a second engineered signaling polypeptide that can include a chimeric antigen receptor; an miRNA, a control element, such as a riboswitch, which typically regulates expression of the first and/or the second engineering signaling polypeptide; a safety switch polypeptide, an intron, a promoter that is active in a target cell, such as a T cell, a 2A cleavage signal and/or an IRES.

### Kits and Commercial Products

[0249] In another aspect, provided herein is a delivery composition or suspension, for example for treating or preventing a disease, for example cancer or tumor growth, comprising polynucleotides, such as polynucleotide vectors, in illustrative replication incompetent recombinant retroviral particle (RIPs), or modified cells, such as a modified lymphocytes, modified TILs, modified lymphocytes other than B cells, or modified T cells and/or modified NK cells as an active ingredient. In another aspect, provided herein is an infusion composition or other cell formulation for treating or preventing cancer or tumor growth comprising polynucleotides such as polynucleotide vectors, in illustrative embodiments RIPs, or modified cells, such as a modified lymphocytes, modified TILs, modified lymphocytes other than B cells, or modified T cells and/or modified NK cells. The polynucleotides such as polynucleotide vectors, in illustrative embodiments RIPs, or modified cells, such as a modified lymphocytes, modified TILs, modified lymphocytes other than B cells, or modified T cells and/or modified NK cells of the delivery composition or infusion composition can include any of the aspects, embodiments, or subembodiments discussed above or elsewhere herein, for example that include nucleic acids that encode anti-idiotype polypeptides, as well as a CAR, an LE, a cytokine and/or a TCR.

[0250] Provided herein in one aspect is a container, such as a commercial container or package, or a kit comprising the same, comprising polynucleotides, such as polynucleotide vectors, for example RIPs, or modified cells, such as a modified lymphocytes, modified TILs, modified lymphocytes other than B cells, or modified T cells and/or modified NK cells according to any of the aspects and embodiments provided herein. As a non-limiting example, the polynucleotides, such as polynucleotide vectors, for example RIPs, or modified cells, such as a modified lymphocytes, modified TILs, modified lymphocytes other than B cells, or modified T cells and/or modified NK cells can comprise in their genome a polynucleotide comprising one or more nucleic acid sequences operatively linked to a promoter active in T cells and/or NK cells. In some embodiments, a nucleic acid sequence of the one or more nucleic acid sequences can encode an anti-idiotype polypeptide, an inhibitory RNA, a cytokine, a lymphoproliferative element and/or a chimeric antigen receptor (CAR) comprising an antigen-specific targeting region (ASTR), a transmembrane domain, and an intracellular activating domain. In some embodiments, a nucleic acid sequence of the one or more nucleic acid sequences can encode one, two or more inhibitory RNA molecules directed against one or more RNA targets.

[0251] The container that contains the polynucleotides, such as polynucleotide vectors, for example RIPs, or modified cells, such as a modified lymphocytes, modified TILs, modified lymphocytes other than B cells, or modified T cells and/or modified NK cells in any aspect or embodiment, including commercial container as well as kits, can be a cryopreservation infusion bag, tube, vial, well of a plate, or other vessel for storage of polynucleotides, such as polynucleotide vectors, for example RIPs, or modified cells, such as a modified lymphocytes, modified TILs, modified lymphocytes other than B cells, or modified T cells and/or modified NK cells. In fact, some aspects provided herein, comprise a container comprising polynucleotides, such as polynucleotide vectors, for example RIPs, or modified cells, such as a modified lymphocytes, modified TILs, modified lymphocytes other than B cells, or modified T cells and/or modified NK cells, wherein such biological include any nucleic acid(s) or other component(s) disclosed herein. Such container in illustrative embodiments includes substantially pure polynucleotides, such as polynucleotide vectors, for example RIPs, or modified cells, such as a modified lymphocytes, modified TILs, modified lymphocytes other than B cells, or modified T cells and/or modified NK cells, sometimes referred to herein for shorthand, as substantially pure biologic. Typically, a preparation and/or container of substantially pure biologic is sterile, and negative for mycoplasma, replication competent retroviruses, and adventitious viruses according to standard protocols (see e.g., “Viral Vector Characterization: A Look at Analytical Tools”; Oct. 10, 2018 (available at https://cellculturedish.com/viral-vector-characterization-analytical-tools/)). Exemplary methods for generating substantially pure biologics and cells for cell therapy are known. For example, for such methods with respect to RIPs, viral supernatants can be purified by a combination of depth filtration, TFF, benzonase treatment, diafiltration, and formulation. In certain illustrative embodiments, a substantially pure biologic meets all of the following characteristics based on quality control testing results:
[0252] a) negative for mycoplasma;
[0253] b) endotoxin at less than 25 EU/ml, and in certain further illustrative embodiments, less than 10 EU/ml;
[0254] c) absence of replication competent retroviruses detected of the same type as purposefully in the container (e.g., lentiviruses) detected; and
[0255] d) absence of adventitious viruses detected;

[0256] Furthermore, if the biologic is a viral particle, such as a retroviral particle, in exemplary embodiments, it meets the following quality control testing results:
[0257] a) less than 1 pg host cell DNA/ viral TU, and in certain further illustrative embodiments, less than 0.3 pg / TU;
[0258] b) less than 100 residual plasmid copies/ viral TU, and in certain further illustrative embodiments, less than 10 copies/viral TU of any plasmid used to make the recombinant retroviral particles;
[0259] c) less than 1 ng HEK protein/ TU, and in certain further illustrative embodiments, less than 50 pg HEK protein /TU; and
[0260] d) greater than 100 TU / ng P24 protein, and in certain further illustrative embodiments, greater than 10,000 TU /ng P24 protein.

[0261] Retroviral particles are typically tested against release specifications that include some or all of those provided above, before they are released to a customer. Potency of each particle may be defined on the basis of p24 viral capsid protein by ELISA, viral RNA genome copies by q-RT PCR, measurement of reverse transcriptase activity by qPCR-based product-enhanced RT (PERT) assay but can all be converted to infectious titer by measuring functional gene transfer Transducing Units (TUs) in a bioassay.

[0262] Determination of infectious titer of purified bulk retrovirus material and finished product by bioassay and qPCR is an exemplary analytical test method for the determination of infectious titer of retroviruses. An indicator cell bank (such as F1XT) may be grown for example in serum free media, seeded at 150,000 cells per well, followed by exposure to serial dilutions of the retrovirus product. Dilutions of purified retrovirus particles are made on indicator cells, for example from 1:200 to 1:1,600. A reference standard virus may be added for system suitability. Following 4 days of incubation with retrovirus, the cells are harvested, DNA extracted and purified. A standard curve, for example from 100-10,000,000 copies/ well, of human genome and unique retroviral genome sequence plasmid pDNA amplicons are used followed by addition of genomic DNA of the cell samples exposed to retrovirus particles. For each PCR reaction, the Cq values of both the retrovirus amplicon and the endogenous control such as humanRNAseP are extrapolated back to copies per reaction. From these values the integrated genome copy number is calculated. In some cases, indicator cells such as 293T have been characterized as being triploid, hence 3 copies of a single copy gene per cell should be utilized in the calculation. Using the initial viable cell count per well, the volume of retrovirus added to the cells and the genome copy number ratio a Transducing Unit (TU) per ml retrovirus particles may be determined.

[0263] Potency testing can include potency testing against release specifications with purity and specific activity. For example, potency release testing of final product can include measurement of the number of Transducing Units (TU) can be compared to viral particle quantity (e.g., by performing an ELISA against a viral protein, for example for lentivirus by performing a p24 capsid protein ELISA with a cutoff of at least 100, 1,000, 2,000 or 2,500 TU/ng p24), and CAR functionality, for example by measuring interferon gamma release by a reporter cell line exposed to gene modified cells.

[0264] In any of the kit or isolated replication incompetent recombinant retroviral particle aspects herein, that include a container of such retroviral particles, sufficient recombinant retroviral particles are present in the container to achieve an MOI (the number of Transducing Units, or TUs applied per cell) in a reaction mixture made using the retroviral particles, of between 0.1 and 50, 0.5 and 50, 0.5 and 20, 0.5 and 10, 1 and 25, 1 and 15, 1 and 10, 1 and 5, 2 and 15, 2 and 10, 2 and 7, 2 and 3, 3 and 10, 3 and 15, or 5 and 15 or at least 0.1, 0.5, 1, 2, 2.5, 3, 5, 10 or 15, or to achieve an MOI of at least 0.1, 0.5, 1, 2, 2.5, 3, 5, 10 or 15. The Transducing Units of virus particles provided in the kit should enable the use an MOI that prevents producing too many integrants in an individual cell, on average less than 3 lentigenome copies per cellular genome and more preferably 1 copy per cell. For kit and isolated retroviral particle embodiments, such MOI can be based on 1, 2.5, 5, 10, 20, 25, 50, 100, 250, 500, or 1,000 ml of reaction mixture assuming 1×10° target cells/ml, for example in the case of whole blood, assuming 1 × 10⁶ PBMCs/ml of blood. Accordingly, a container of retroviral particles can include between 1 × 10⁵ and 1 × 10⁹, 1 × 10⁵ and 1 × 10^{8,} 1 × 10⁵ and 5 × 10⁷, 1 × 10⁵ and 1 × 10⁷, 1 × 10⁵ and 1 × 10⁶; 5 × 10⁵ and 1 × 10⁹; 5 × 10⁵ and 1 × 10^{8,} 5 × 10⁵ and 5 × 10⁷, 5 × 10⁵ and 1 × 10⁷, 5 × 10⁵ and 1 × 10⁶, or 1 × 10⁷ and 1 × 10⁹, 1 × 10⁷ and 5 × 10⁷, 1 × 10⁶ and 1 × 10⁷, and 1 × 10⁶ and 5 × 10⁶ TUs. In certain illustrative embodiments, the container can contain between 1 × 10⁷ and 1 × 10⁹, 5 × 10⁶ and 1 × 10^{8,} 1 × 10⁶ and 5 × 10⁷, 1 × 10⁶ and 5 × 10⁶ or between 5 ×10⁷ and 1 ×10⁸ retroviral Transducing Units. Not to be limited by theory, such numbers of particles would support between 1 and 100 ml of blood at an MOI of between 1 and 10. In some illustrative embodiments, as indicate herein, as little as 10 ml, 5 ml, 3 ml, or even 2.5 ml of blood can be processed for T cell and/or NK cell modification and optionally subcutaneous and/or intramuscular administration methods provided herein. Thus, an advantage of the present methods is that in some illustrative embodiments, they require far fewer retroviral particle Transducing Units than prior methods that involve nucleic acids encoding a CAR, such as CAR-T methods.

[0265] Each container that contains retroviral particles, can have, for example, a volume of between 0.05 ml and 5 ml, 0.05 ml and 1 ml, 0.05 ml and 0.5 ml, 0.1 ml and 5 ml, 0.1 ml and 1 ml, 0.1 ml and 0.5 ml, 0.1 and 10 ml, 0.5 and 10 ml, 0.5 ml and 5 ml, 0.5 ml and 1 ml, 1.0 ml and 10.0 ml, 1.0 ml and 5.0 ml, 10 ml and 100 ml, 1 ml and 20 ml, 1 ml and 10 ml, 1 ml and 5 ml, 1 ml and 2 ml, 2 ml and 20 ml, 2 ml and 10 ml, 2 ml and 5 ml, 0.25 ml to 10 ml, 0.25 to 5 ml, or 0.25 to 2 ml.

[0266] In some embodiments where the kit includes modified cells, such as modified lymphocytes, modified TILs, modified lymphocytes that are not B cells, such as modified T cells and/or modified NK cells in a cell suspension within a commercial container, for example a cryopreservation infusion bag, the container, such as the cryopreservation infusion bag, can hold 5, 10, 15, 20, 25, 50, 75, 100, 150, 200, 250, 300, 400, or 500 ml or less of blood. In some embodiments, the container, for example cryopreservation infusion bag can hold at least 5, 10, 15, 20, 25, 50, 75, 100, 150, 200, 250, 300, 400, or 500 ml of blood. In some embodiments, the container, for example cryopreservation infusion bag can hold between 1, 2, 3, 4, 5, 10, 15, 20, 25, and 50 ml of blood on the low end of the range and 10, 15, 20, 25, 50, 75, 100, 150, 200, 250, 300, 400, and 500 ml of blood on the high end of the range. In some embodiments, the container, for example cryopreservation infusion bagcan hold between 1, 2, 3, 4, 5, 10, 15, 20, 25, and 50 ml of blood on the low end of the range and 10, 15, 20, 25, 50, 75, 100, 150, 200, 250, 300, 400, and 500 ml of blood on the high end of the range. For example, the container, for example cryopreservation infusion bag can hold between 1 and 10 ml, 5 and 25 ml, 10 and 50 ml, 25 and 100 ml, 50 and 200 ml, or 100 and 500 ml of blood. In some embodiments, the container, for example cryopreservation infusion bag can include heparin. In other embodiments, the container, for example cryopreservation infusion bag do not include heparin.

[0267] In some embodiments where the kit includes modified cells, such as a modified lymphocytes, modified TILs, modified lymphocytes other than B cells, or modified T cells and/or modified NK cells in a cell suspension within a commercial container, such as a cell cryopreservation infusion bag, the number of cells delivered can be sufficient to provide between 1 × 10⁵ cells and 1 × 10⁹, between 1 × 10⁶ cells and 1 × 10⁹, or between 1 × 10⁶ cells and 5 × 10^{8,} for example CAR-positive viable T cells and/or NK cells per kg of body weight of the subject to which the cells are to be delivered. Accordingly, in some embodiments the commercial container, can include the aforementioned ranges × 50-150 kg, or 50-100 kg. In some embodiments, the commercial container includes between 1 × 10⁷ and 1 × 10¹¹ cells, between 1 × 10⁸ and 1 × 10¹¹ cells, or between 1 × 10⁸ and 5 × 10¹⁰ cells, for example CAR-positive viable T cells and/or NK cells, or in an illustrative embodiment, cells that are positive for an anti-idiotype extracellular recognition domain.

[0268] In illustrative embodiments, the polynucleotides encoding the anti-idiotype polypeptide and in illustrative embodiments the CAR are located in the genome of retroviral particles, typically substantially pure retroviral particles, according to any of the replication incompetent recombinant retroviral particle aspects and embodiments provided herein. In illustrative embodiments, the replication incompetent recombinant retroviral particles in the kit comprise a polynucleotide comprising one or more transcriptional units operatively linked to a promoter active in T cells and/or NK cells, wherein the one or more first transcriptional units encode a first polypeptide comprising an anti-idiotype polynucleotide and a CAR or an LE and optionally encode a second polypeptide comprising the other of a CAR or an LE, according to any of the embodiments provided herein.

[0269] A kit provided herein can include a container containing the polynucleotides, such as polynucleotide vectors, for example RIPs, or modified cells, such as, modified lymphocytes, modified TILs, modified lymphocytes other than B cells, for example modified T cells and/or NK cells, and an accessory kit. The accessory kit components can include one or more of the following:
[0270] a) one or more containers containing a delivery solution compatible with, in illustrative embodiments effective for, and in further illustrative embodiments adapted for subcutaneous and/or intramuscular administration as provided herein;
[0271] b) one or more containers of hyaluronidase as provided herein;
[0272] c) one or more blood bags such as a blood collection bag, in illustrative embodiments comprising an anticoagulant in the bag, or in a separate container, a blood processing buffer bag, a blood processing waste collection bag, and a blood processing cell sample collection bag;
[0273] d) one or more sterile syringes compatible with, in illustrative embodiments effective for, and in further illustrative embodiments adapted for, subcutaneous or intramuscular delivery of T cells and/or NK cells;
[0274] e) a T cell activation element as disclosed in detail herein, for example anti-CD3 provided in solution in the container containing the retroviral particle, or in a separate container, or in illustrative embodiments, is associated with a surface of the replication incompetent retroviral particle;
[0275] f) one or a plurality of leukoreduction filtration assemblies;
[0276] g) one or more containers containing a solution or media compatible with, in illustrative embodiments effective for, and in further illustrative embodiments adapted for transduction of T cells and/or NK cells;
[0277] h) one or more containers containing a solution or media compatible with, in illustrative embodiments effective for, and/or in further illustrative embodiments adapted for rinsing T cells and/or NK cells;
[0278] i) one or more containers containing a pH-modulating pharmacologic agent;
[0279] j) one or more containers containing polynucleotides, typically substantially pure polynucleotides (e.g. found within recombinant retroviral particles according to any embodiment herein), comprising one or more second transcriptional units operatively linked to a promoter active in T cells and/or NK cells, wherein the one or more second transcriptional units encode a polypeptide comprising a second CAR directed against a different target epitope, and in certain embodiments a different antigen, in illustrative embodiments found on a same target cancer cell (e.g. B cell);
[0280] k) one or more containers containing a cognate antigen for the first CAR and/or the second CAR encoded by the nucleic acids (e.g., retroviral particles); and
[0281] l) instructions, either physically or digitally associated with other kit components, for the use thereof, for example for modifying T cells and/or NK cells, for delivering modified T cells and/or NK cells to a subject subcutaneously or intramuscularly, and/or for treating tumor growth or cancer in a subject.

[0282] In any of the kit aspects and embodiments herein that include an antigen or a cognate antigen, less than 50%, 40%, 30%, 20%, 10%, 5%, or 1% of the polypeptides in the kit are non-human, i.e., produced from non-human sources.

[0283] In some embodiments, the kit may be a single-pack/use kit, but in other embodiments the kit is a multi-pack or multi-use kit for the processing of more than one blood sample from contacting with nucleic acids encoding a CAR optionally thru subcutaneous administration. Typically, a container of nucleic acids encoding a CAR (and optionally a paired container of nucleic acids encoding a second CAR in certain embodiments) in the kit is used for one performance of a method for modifying T cells and/or NK cells and optionally subcutaneous administration. The container(s) containing nucleic acids encoding a CAR and optionally a second CAR is typically stored and shipped frozen. Thus, a kit can include sufficient containers (e.g., vials) of nucleic acids encoding a CAR (and optionally paired containers encoding a second CAR in certain embodiments) for 1, 2, 3, 4, 5, 6, 10, 12, 20, 24, 50 and 100 performances of a method for modifying a T cell and/or NK cell provided herein, and thus can include 1, 2, 3, 4, 5, 6, 10, 12, 20, 24, 50 and 100 containers (e.g., vials) of nucleic acids encoding the CAR (e.g., retroviral particles), and similarly is considered a 1, 2, 3, 4, 5, 6, 10, 12, 20, 24, 50 and 100 pack, performance, administration or X kit, respectively. Similarly, accessory components in the kit would be provided for similar numbers of performances of a method for modifying T cells and/or NK cells and optionally subcutaneous administration, using the kit.

[0284] The one or more leukoreduction filtration assemblies, if present in such a kit, typically include(s) one or a plurality of leukoreduction filters or leukoreduction filter sets, each typically within a filter enclosure, as well as a plurality of connected sterile tubes connected or adapted to be connected thereto, and a plurality of valves connected or adapted to be connected thereto, that are adapted for use in a single-use closed blood processing system. Typically, there is one leukoreduction filtration assembly for each container of nucleic acid encoding a CAR in a kit. Thus a 20-pack kit in illustrative embodiments, includes 20 vials of nucleic acids encoding a CAR and 20 leukoreduction filtration assemblies. In some embodiments, a kit herein comprises one or a plurality of containers containing nucleic acids and one or more leukoreduction filtration assemblies. Such a kit can optionally be intended to be used for administration to a subject via any route including for example, infusion or in illustrative embodiments intramuscular and/or in further illustrative embodiments, subcutaneous delivery. Thus, such a kit optionally includes other accessory components that are intended to be used with such route of administration. The one or more containers of subcutaneous or intramuscular delivery solution is discussed in more detail herein, is typically sterile and can include a total combined volume, or individually per container, of 100 ml to 5 L, 1 ml to 1 L, 1 ml to 500 ml, 1 ml to 250 ml, 1 ml to 200 ml, 1 ml to 100 ml, 1 ml to 10 ml, or 1 ml to 5 ml; 5 ml to 1 L, 5 ml to 500 ml, 5 ml to 250 ml, 5 ml to 100 ml, 5 ml to 10 ml, or approximately 5 ml. In some illustrative embodiments, the kit comprises a plurality of containers of subcutaneous delivery solution, with each container having a volume of between 10 ml and 200 ml, 10 ml and 100 ml, 1 ml and 20 ml, 1 ml and 10 ml, 1 ml and 5 ml, 1 ml and 2 ml, 2 ml and 20 ml, 2 ml and 10 ml, 2 ml and 5 ml, 0.25 ml to 10 ml, 0.25 to 5 ml, or 0.25 to 2 ml. In illustrative embodiments, there is one container of delivery solution for each container of nucleic acid encoding a CAR in a kit. Thus, a 20-pack kit in illustrative embodiments, includes 20 vials of nucleic acids encoding a CAR and 20 containers of sterile delivery solution.

[0285] In certain kit aspects, provided herein are embodiments in which either or both the container(s) containing nucleic acids encoding a first CAR and optionally nucleic acids encoding a second CAR, are nucleic acids according to any of the self-driving CAR embodiments provided herein. In such embodiments, accessory components of the kit can further include one or more of the following:
[0286] a. one or more containers containing a delivery solution adapted for, compatible with, and/or effective for, intravenous or intraperitoneal administration as provided herein; and
[0287] b. Instructions, either physically or digitally associated with other kit components, for the use thereof, for example for delivering modified T cells and/or NK cells to a subject intravenously or intraperitoneally.

[0288] In certain aspects, provided herein are the use of a RIPs in the manufacture of a kit for modifying a T cell or NK cell, wherein the use of the kit includes: contacting the T cell or NK cell ex vivo with the replication incompetent recombinant retroviral particle, wherein the replication incompetent recombinant retroviral particle includes a pseudotyping element on a surface and a T cell activation element on the surface, wherein said contacting facilitates transduction of the T cell or NK cell by the replication incompetent recombinant retroviral particle, thereby producing a modified and in illustrative embodiments genetically modified T cell or NK cell.

[0289] In some aspects, provided herein are aspects that include the use of a RIP in the manufacture of a kit for modifying a T cell or NK cell. Details regarding polynucleotides, and replication incompetent recombinant retroviral particles that contain such polynucleotides are disclosed in more detail herein, and in the Exemplary Embodiments section. In some embodiments, the T cell or NK cell can be from a subject. In some embodiments, the T cell activation element can be membrane-bound. In some embodiments, the contacting can be performed for between 1, 2, 3, 4, 5, 6, 7, or 8 hours on the low end of the range and 4, 5, 6, 7, 8, 10, 12, 15, 18, 21, and 24 hours on the high end of the range, for example, between 1 and 12 hours. The replication incompetent recombinant retroviral particle for use in the manufacture of a kit can include any of the aspects, embodiments, or subembodiments discussed elsewhere herein.

[0290] Furthermore, provided herein in another aspect is a container, such as a commercial container or package, or a kit comprising the same, comprising isolated packaging cells, in illustrative embodiments isolated packaging cells from a packaging cell line, according to any of the packaging cell and/or packaging cell line aspects provided herein. In some embodiments, the kit includes additional containers that include additional reagents such as buffers or reagents used in methods provided herein. Furthermore, provided herein in certain aspects are use of any replication incompetent recombinant retroviral particle provided herein in any aspect, in the manufacture of a kit for modifying and in illustrative embodiments genetically modifying a T cell or NK cell according to any aspect provided herein. Furthermore, provided herein in certain aspects are use of any packaging cell or packaging cell line provided herein in any aspect, in the manufacture of a kit for producing the replication incompetent recombinant retroviral particles according to any aspect provided herein.

### Self-Driving Car Methods and Compositions

[0291] Provided herein in certain aspects are polynucleotides referred to herein as “self-driving CARs” that encode a membrane-bound lymphoproliferative element whose expression in a T cell or NK cell is under the control of an inducible promoter that is induced by the binding of an antigen to an extracellular binding pair member polypeptide that is expressed by the T cell or NK cell and is functionally linked to a intracellular activating domain, for example a CD3 zeta intracellular activating domain or any of the intracellular activating domains disclosed elsewhere herein. In illustrative embodiments herein, an anti-idiotype polypeptide is co-expressed by the T cell or NK cell to provide additional functional optionality for self-driving CARs. In an illustrative embodiments, the co-expressed anti-idiotype polypeptide is a safety switch. In illustrative embodiments, such a binding pair member polypeptide is a CAR. In other embodiments, such a binding pair member polypeptide is a TCR. Thus, in certain embodiments, provided herein are polynucleotides that include an inducible promoter operably linked to a nucleic acid encoding a membrane-bound lymphoproliferative element, that is induced by CAR-binding to its target. Expression of the lymphoproliferative element can induce proliferation of the T cell or NK cell. Provided herein in certain aspects are genetically modified or transduced T cells referred to herein as “self-driving CAR-T cells” that include a self-driving CAR. Any of the embodiments that include a self-driving CAR-T cell could include a “self-driving CAR NK cell,” which is a genetically modified or transduced NK cell that includes a self-driving CAR. In some embodiments, the self-driving CAR NK cell is present in addition to the self-driving CAR-T cell. In other embodiments, the self-driving CAR NK cell is present instead of the self-driving CAR-T cell. Various embodiments that include a self-driving CAR are disclosed in the Exemplary Embodiments section herein and can be combined with any of the embodiments or details of this section.

### Illustrative Cell Processing Methods for Genetically Modifying T Cells and/or NK Cells

[0292] Methods provided herein in illustrative aspects include methods for modifying T cells and/or NK cells, or related methods of making cell formulations, that include contacting blood cells comprising lymphocytes (e.g., NK cells and/or T cells) ex vivo in a reaction mixture, with recombinant vectors such as replication incompetent recombinant retroviral particles, that are or include polynucleotides that encode a CAR. In illustrative embodiments, the reaction mixture includes a T cell activation element, either in solution or on the surface of the recombinant retroviral particles, to facilitate genetic modification of T cells in the reaction mixtureSome of the methods provided herein include an optional step where blood is collected (110) from a subject. Blood can be collected or obtained from a subject by any suitable method known in the art as discussed in more detail herein. For example, the blood can be collected by venipuncture, apheresis or any other blood collection method by which a sample of blood is collected. In some embodiments, the volume of blood collected is between 1 and 120 ml. In illustrative embodiments, especially those in which a subject from whom blood is taken has normal levels of NK cells and in illustrative embodiments, T cells, the volume of blood collected is between 1 ml and 25 ml.

[0293] It is noteworthy that some embodiments of methods for modifying and in illustrative embodiments genetically modifying provided herein do not include a step of collecting blood from a subject. Regardless of whether blood is collected from a subject, in illustrative method aspects provided herein for modifying lymphocytes (e.g., T cells and/or NK cells), the lymphocytes are contacted with encapsulated nucleic acid vectors (e.g. replication incompetent retroviral particles) in a reaction mixture. In illustrative embodiments, this contacting, and the reaction mixture in which the contacting occurs, takes place within a closed cell processing system, as discussed in more detail herein. Such a closed processing system and method used in some aspects and embodiments of systems and methods provided herein can be any system and method known in the art. As non-limiting examples, the system or method can be a traditional closed cell processing system and method, or a system or method referred to herein as a “more recent” method or system (See e.g., WO2018/136566 and WO2019/055946, each incorporated herein by reference in their entirety). In traditional closed cell processing methods that involve genetic modification and/or transductions of lymphocytes ex vivo, especially in methods for autologous cell therapy, many steps occur over days, such as PBMC enrichment(s), washing(s), cell activation, transduction, expansion, collection, and optionally reintroduction. In more recent methods, some of the steps and time involved in this ex vivo cell processing have been reduced (see, e.g., WO2018/136566). In other more recent methods (See FIG. 1A), some of the steps and time involved in this ex vivo cell processing have been further reduced or as with, for example, the ex vivo expansion step, eliminated (see, e.g., WO2019/055946). These more recent methods (as well as the further improved cell processing methods provided herein), furthermore use a rapid ex vivo transduction process, for example that includes no or minimal preactivation (e.g., less than 30, 15, 10, or 5 minutes of contacting lymphocytes such as T cells and/or NK cells with an activation agent before they are contacted with retroviral particles). In certain embodiments of such methods, a T cell and/or NK cell activation element is present in the reaction mixture in which the contacting step occurs. In illustrative embodiments, the T cell and/or NK cell activation element is associated with surfaces of retroviral particles present in the reaction mixture. In illustrative embodiments, such a method that uses rapid ex vivo gene modification without an ex vivo expansion step is used in a rapid point-of-care (rPOC) autologous cell therapy method. However, such more recent methods still involve a PBMC enrichment step/procedure (120A), which typically takes at least around 1 hour within the closed system, followed by cell counting, transfer and media addition, which takes at least around 45 additional minutes before lymphocytes are contacted with retroviral particles to form a transduction reaction mixture (130A). Following the “viral transduction” step, which typically is a contacting step with incubating as discussed in detail herein, lymphocytes are typically washed away from retroviral particles that remain in suspension (140A), for example using a Sepax, and collected by resuspending the PBMCs in a delivery solution (150A) to form a cell formulation typically in an infusion bag for reinfusion, a syringe for injection, or cryopreservation vial for storage (160A). As discussed in further detail herein, traditional PBMC enrichment procedures typically involve ficoll density gradients and centrifugal (e.g., centrifugation) or centripetal (e.g., Sepax) forces or use leukophoresis to enrich PBMCs.

[0294] The inventors have observed that subcutaneous administration has shown surprising results, with increased engraftment of modified and/or genetically modified lymphocytes relative to modified and/or genetically modified lymphocytes introduced through intravenous infusion. This has led to more effective CAR-dependent tumor reduction and elimination in animals. In illustrative embodiments, modified lymphocytes (e.g., T cells and/or NK cells) in a solution are introduced, and in illustrative embodiments reintroduced into a subject by subcutaneous administration, delivery, or injection. In some examples of these embodiments that involve contacting lymphocytes in reaction mixtures with retroviral particles such as those exemplified in FIG. 1, including illustrative embodiments that include at least some other blood components not typically present after the lymphocytes are isolated in a PBMC enrichment procedure, resulting cell formulations, which are separate aspects provided herein, are optionally administered (e.g., readministered) into a subject. In illustrative embodiments, (FIG. 1D) where a PBMC enrichment procedure is not used after lymphocytes are contacted with retroviral particles, cell formulations produced there can be reintroduced back into a subject using subcutaneous or intramuscular administration. Thus, as discussed in more detail herein, some aspects provided herein are cell formulations, as well as delivery solutions (i.e., excipients) for making such cell formulations, that are compatible with, in illustrative embodiments effective for, and in further illustrative embodiments adapted for subcutaneous delivery. Not to be limited by theory, it is believed that the presence of additional blood cells, especially neutrophils, in a process that only uses cell processing filters to concentrate and/or wash lymphocytes, such as HemaTrate filters, renders the cell preparations more amenable to subcutaneous delivery to avoid some additional risks present if these other blood cell types, especially neutrophils or aggregated T cells, are infused directly back into the blood of a patient. For example, a subcutaneous formulation of retrovirus reconstituted with total nucleated cells on a lymphoreduction filter may contain, in addition to lymphocytes, neutrophils (or more generally granulocytes). In illustrative embodiments, the cell formulation comprises neutrophils, B cells, monocytes, red blood cells, basophils, eosinophils, and/or macrophages together with modified T cells (CAR-T cells) and/or NK cells (CAR-NK cells). A subcutaneous or intramuscular formulation and administration are advantageous over intravenous formulation and administration because a formulation (suspension) of retrovirus reconstituted with lymphocytes may further comprise cellular aggregates and express adhesion receptors that may introduce pulmonary congestion with intravenous delivery.

[0295] Methods for subcutaneous administration are well known in the art and typically involve administration into the fat layer under the skin. It should be noted that it is contemplated that any embodiment herein that involves subcutaneous delivery, can instead be intramuscular delivery, which is delivery into the muscle, intradermal, or intratumoral delivery. In some embodiments, subcutaneous administrations can be performed in the upper thigh, upper arm, abdomen, or upper buttocks of a subject. Subcutaneous administration is distinguishable from intraperitoneal administration, which penetrates through the fatty layer used in subcutaneous administration and delivers a formulation or drug into the peritoneum of the subject.

### Steps and Reaction Mixtures for Methods Herein

[0296] Provided herein in certain aspects, is a method of administering modified cells to a subject, which can include before delivering the modified cells to the subject, a step of transducing, transfecting, genetically modifying, and/or modifying the cells. The cells can be lymphocytes, such as a (typically a population of) peripheral blood mononuclear cells (PBMCs), typically T cells and/or an NK cells, and in certain illustrative embodiments resting T cells and/or resting NK cells. The transducing, transfecting, modifying and/or genetically modifying step, can include contacting the lymphocytes with a population of recombinant nucleic acid/polynucleotide vectors, which in certain illustrative embodiments include nucleic acids encoding an anti-idiotype polypeptide, and which in illustrative embodiments are replication incompetent recombinant retroviral particle (RIPs), wherein said contacting (and incubation under contacting conditions) facilitates membrane association, membrane fusion or endocytosis, and optionally transduction or transfection of the cells, for example resting T cells and/or NK cells by the recombinant nucleic acid vectors, thereby producing the modified and in illustrative embodiments genetically modified T cells and/or NK cells. It is noteworthy that although many of the aspects and embodiments provided herein are discussed in terms of RIPs, it is intended, and a skilled artisan will recognize, that many different recombinant nucleic acid/polynucleotide vectors, including but not limited to those provided herein, can be used and/or included in such methods and compositions. In illustrative embodiments wherein the recombinant nucleic acid vector is a RIP, the RIP typically comprises a fusogenic element and a binding element, which can be part of a pseudotyping element, on its surface. In some embodiments, T cells and/or NK cells are activated before being contacted by the RIP or other polynucleotide vector. In illustrative embodiments, pre-activation of the T cell and/or NK cell is not required, and an activation element, which can be any activation element provided herein, is present in a reaction mixture in which the contacting takes place. In further illustrative embodiments, the activation element is present on a surface of the replication incompetent recombinant retroviral particle. In illustrative embodiments, the activation element is anti-CD3, such as anti-CD3 scFv, or anti-CD3 scFvFc.

[0297] Many of the method aspects provided herein, include one or more of the following steps: 1) a step of collecting blood from a subject; 2) a step of contacting cells, such as NK cells and/or in illustrative embodiments T cells, which can be from the collected blood, with a recombinant vector (typically many copies thereof), in illustrative embodiments a RIP, encoding a CAR and/or a lymphoproliferative element, in a reaction mixture, where the contacting can include an optional incubation; 3) a step of washing unbound recombinant vector away from the cells in the reaction mixture; 4) a step of collecting modified cells, such as modified NK cells and/or in illustrative embodiments modified T cells in a solution, which in illustrative embodiments can be a delivery solution, to form a cell suspension, that in illustrative embodiments is a cell formulation; and 5) a step of delivering the cell formulation to a subject, in illustrative embodiments the subject from which blood was collected, for example through infusion, or in certain illustrative embodiments intradermally, intramuscularly or intratumorally, or in further illustrative embodiments, subcutaneously. It is noteworthy that in certain illustrative embodiments, the reaction mixture includes unfractionated whole blood or includes one or more cell type that is not a PBMC, and can include all or many cell types found in whole blood, including total nucleated cells (TNCs). It is noteworthy that in certain embodiments, the recombinant vector comprises a self-driving CAR, which encodes both a CAR and a lymphoproliferative element.

[0298] As a non-limiting example, in some embodiments, between 10 and 120 ml of blood is collected (or leukocytes are isolated in 10 to 120 ml by performing leukapheresis on 0.5 to 2.0 total blood volumes); the collected, unfractionated blood/isolated cells are passed through a leukoreduction filter to isolate TNCs on top of the filter; replication incompetent recombinant retroviral particles are added to the TNCs on top of the leukoreduction filter to a total reaction mixture volume of 500 µl to 10 ml to form a reaction mixture and initiate contacting; the reaction mixture is optionally incubated for any of the contacting times provided herein, as a non-limiting example, for 1-4 hours; the non-associated replication incompetent recombinant retroviral particles are washed away from cells in the reaction mixture by filtering the reaction mixture with 10 to 120 ml of wash solution; and the cells, including modified T cells and NK cells, which are retained on the TNC filter, are eluted from the filter with 2 ml to 10 ml of delivery solution, thereby forming a cell formulation suitable for introduction or reintroduction into a subject.

[0299] Some embodiments of any methods used in any aspects provided herein, which can include a step for modifying and in illustrative embodiments genetically modifying lymphocytes, PBMCs, and in illustrative embodiments NK cells and/or in further illustrative embodiments, T cells, can include a step of collecting blood from a subject. The blood includes blood components including blood cells such as lymphocytes (e.g., T cells and NK cells) that can be used in methods and compositions provided herein. In certain illustrative embodiments, the subject is a human subject afflicted with cancer (i.e., a human cancer subject). It is noteworthy that certain embodiments do not include such a step. However, in embodiments that include collecting blood from a subject, blood can be collected or obtained from a subject by any suitable method known in the art as discussed in more detail herein, and as such the collected blood or blood-derived component can be referred to as a “blood-derived product” and typically is a “peripheral blood-derived product,” since typically it is isolated from peripheral blood. For example, the blood-derived product can be collected by venipuncture or any other blood collection method known in the art, by which a sample of unfractionated whole blood is collected in a vessel, for example a blood bag, or by which leukocytes and lymphocytes are isolated from blood, such as by apheresis (e.g., leukapheresis or lymphoplasmapheresis). In some embodiments, the volume of blood (e.g., unfractionated whole blood) collected is between 1 and 5 ml, 5 and 10 ml, 10 and 15 ml, 15 and 20 ml, 20 and 25 ml, 5 and 25 ml, 25 ml and 250 ml, 25 ml and 125 ml, 50 ml and 100 ml, or 50 ml and 250 ml, 75 ml and 125 ml, 90 ml and 120 ml, or between 95 and 110 ml. In some embodiments, the volume of blood collected can be between 1, 5, 10, 15, 20, 25, 30, 35, 40, 45, 50, 55, 60, 65, 70, 75, 80, 85, 90, 95, 100, 110, 120, 130, 140, 150, 175, 200, 225, 250, 275, 300, 350, 400, 450, 500, 600, 700, 800, or 900 ml on the low end of the range and 25, 30, 35, 40, 45, 50, 55, 60, 65, 70, 75, 80, 85, 90, 95, 100, 110, 120, 130, 140, 150, 175, 200, 225, 250, 275, 300, 350, 400, 450, 500, 600, 700, 800, or 900 ml or 1 L on the high end of the range. In some embodiments, the volume of blood collected is less than 250 ml, 100 ml, 75 ml, 20 ml, 15 ml, 10 ml, or 5 ml. In some embodiments, lymphocytes (e.g., T cells and/or NK cells) can be obtained by apheresis. In some embodiments, the volume of blood taken and processed during apheresis (e.g., leukapheresis or lymphoplasmapheresis) is between 0.5, 0.6, 0.7, 0.75, 0.8, 0.9, 1, 1.25, or 1.5 total blood volumes of a subject on the low end of the range and 0.6, 0.7, 0.75, 0.8, 0.9, 1, 1.25, 1.5 1.75, 2, 2.25, or 2.5 total blood volumes of a subject on the high end of the range, for example between 0.5 and 2.5, 0.5 and 2, 0.5 and 1.5, or between 1 and 2 total blood volumes. The total blood volume of a human typically ranges from 4.5 to 6 L and thus much more blood is typically taken and processed during apheresis than if unfractionated whole blood is collected. Whether target blood cells (e.g., T cells) are obtained by apheresis or unfractionated whole blood is collected for example into a blood bag, it is contemplated that target blood cells (e.g., T cells) therein would be processed according to a method provided herein, which in certain illustrative embodiments results in the target blood cells becoming modified, genetically modified, and/or transduced. When apheresis (e.g., leukapheresis or lymphoplasmapheresis) is used to collect a cell fraction comprising T cells and/or NK cells (e.g., to provide a leukopak or a lymphoplasmapak), such cells are resuspended in solution directly or after one or more washes, to which a recombinant vector encoding a CAR is added to form a reaction mixture provided herein. Such reaction mixture can be used in any method herein. In some illustrative methods where a subject or a blood sample therefrom has a low CD3+ blood cell count, apheresis (e.g., leukapheresis or lymphoplasmapheresis) is used to collect blood cells (e.g., White blood cells or lymphocytes) for inclusion in a method provided herein.

[0300] Regardless of whether blood is collected from a subject or blood cells are obtained by apheresis, in any of the method aspects provided herein that include a step of modifying cell, for example lymphocytes (e.g. T cells and/or NK cells), a population of cells, such as lymphocytes (e.g. T cells and/or NK cells) are typically contacted with many copies of a recombinant vector, which in some embodiments are copies of a non-viral vector, and in illustrative embodiments are identical RIPs, in a reaction mixture. The contacting in any embodiment provided herein, can be performed for example in a chamber of a closed system adapted for processing of blood cells, for example within a blood bag, as discussed in more detail herein. In some embodiments, the blood bag can have 5, 10, 15, 20, 25, 50, 75, 100, 150, 200, 250, 300, 400, or 500 ml or less of blood during the contacting. In some embodiments, the blood bag can have at least 5, 10, 15, 20, 25, 50, 75, 100, 150, 200, 250, 300, 400, or 500 ml of blood during the contacting. In some embodiments, the blood bag can have between 1, 2, 3, 4, 5, 10, 15, 20, 25, and 50 ml of blood on the low end of the range and 10, 15, 20, 25, 50, 75, 100, 150, 200, 250, 300, 400, and 500 ml of blood on the high end of the range during the contacting. For example, the blood bag can have between 1 and 10 ml, 5 and 25 ml, 10 and 50 ml, 25 and 100 ml, 50 and 200 ml, or 100 and 500 ml of blood during the contacting. In some embodiments, the mixture inside the blood bag can include an anti-coagulant such as heparin. In other embodiments, the mixture inside the blood bag does not include an ant-coagulant, or does not include heparin. The transduction reaction mixture can include one or more buffers, ions, and a culture media.

[0301] With respect to retroviral particles, and in illustrative embodiments, lentiviral particles, in certain exemplary reaction mixtures provided herein, between 0.1 and 50, 0.5 and 50, 0.5 and 20, 0.5 and 10, 1 and 25, 1 and 15, 1 and 10, 1 and 5, 2 and 15, 2 and 10, 2 and 7, 2 and 3, 3 and 10, 3 and 15, or 5 and 15, multiplicity of infection (MOI); or at least 1 and less than 6, 11, or 51 MOI; or in some embodiments, between 5 and 10 MOI units of replication incompetent recombinant retroviral particles are present. In some embodiments, the MOI can be at least 0.1, 0.5, 1, 2, 2.5, 3, 5, 10 or 15. With respect to composition and method for transducing lymphocytes in blood, in certain embodiments higher MOI can be used than in methods wherein PBMCs are isolated and used in the reaction mixtures. For example, illustrative embodiments of compositions and methods for transducing lymphocytes in whole blood, assuming 1×10⁶ PBMCs/ml of blood, can use retroviral particles with an MOI of between 1 and 50, 2 and 25, 2.5 and 20, 2.5 and 10, 4 and 6, or about 5, and in some embodiments between 5 and 20, 5 and 15, 10 and 20, or 10 and 15.

[0302] The reaction mixture of the contacting step included in some methods provided herein, or reaction mixture aspects in some embodiments, comprises at least 10% unfractionated whole blood (e.g. at least 10%, 20%, 25%, 50%, 60%, 70%, 80%, 90%, 95%, or 99% whole blood) and optionally an effective amount of an anticoagulant; or the reaction mixture further comprises at least one additional blood or blood preparation component that is not a PBMC, for example the reaction mixture comprises an effective amount of an anticoagulant and one or more blood preparation component that is not a PBMC. A percentage of whole blood is the percent by volume of a reaction mixture that was made using unfractionated whole blood. For example, where a reaction mixture is formed by adding replication incompetent recombinant retroviral particles to whole blood, and in illustrative embodiments unfractionated whole blood, the percentage of whole blood in the reaction mixture is the volume of whole blood by the total volume of the reaction mixture times 100. In illustrative embodiments such blood or blood preparation component that is not a PBMC is one or more (e.g., at least one, two, three, four, or five) or all of the following additional components:
[0303] a) erythrocytes, wherein the erythrocytes comprise between 1 and 60% of the volume of the reaction mixture;
[0304] b) neutrophils, wherein the neutrophils comprise at least 10% of the white blood cells in the reaction mixture, or wherein the reaction mixture comprises at least 10% as many neutrophils as T cells;
[0305] c) basophils, wherein the basophils comprise at least 0.05% of the white blood cells in the reaction mixture;
[0306] d) eosinophils, wherein the reaction mixture comprises at least 0.1% of the white blood cells in the reaction mixture;
[0307] e) plasma, wherein the plasma comprises at least 1% of the volume of the reaction mixture; and
[0308] f) an anticoagulant, (such blood or blood preparation components a-f above referred to herein as (“Noteworthy Non-PBMC Blood or Blood Preparation Components”)).

[0309] In any of the aspects disclosed herein that include a percentage of whole blood, the percentage is based on volume. For example, in certain embodiments at least 25% of the volume of a reaction mixture can be whole blood. Thus, in such embodiments at least 25 ml of 100 ml of such reaction mixture, would be whole blood.

[0310] The inventors have observed that surface expression of the TCR complex, including TCRα, TCRβ, and CD3, on CD4 positive (CD4+) cells and CD8 positive (CD8+) cells is reduced or “dimmed” when such cells are contacted with polynucleotide vectors (e.g., RIPs) displaying a binding polypeptide that binds the TCR complex, e.g., a T cell activation element, as is the case in certain illustrative embodiments herein. This dimming is largely the result of internalization of the TCR complex upon activation. Furthermore, the extent of this dimming increases as the concentration of a given gene vector is increased in the reaction mixture and correlates with the ability of the gene vector to activate and enter cells. Similarly, internalization of other surface polypeptides after binding to polypeptides on the surface of a gene vector results in dimming of the surface polypeptide on the cell being contacted with the gene vector and may be common during transduction using other binding polypeptides. Thus, in some embodiments, a percent reduction in surface polypeptide expression on cells contacted with a gene vector comprising a binding polypeptide compared to surface polypeptide expression on cells not contacted with the gene vector comprising a binding polypeptide is used to quantitate the potency of a gene vector and determine the appropriate dose of gene vector used to modify a population of cells. In illustrative embodiments, a percent reduction in surface TCR complex expression on cells contacted with a gene vector compared to surface TCR complex expression on cells not contacted with the gene vector is used to quantitate the potency of a gene vector and determine the appropriate dose of gene vector used to modify a population of cells. As used herein, a “Dimming Unit” (DU) is the amount of gene vector (e.g. RIR retroviral particles) that reduces the surface expression of a surface polypeptide in 1 ml of a cell mixture after contacting with the gene vector for 4 hours at 37° C. and 5% CO₂ by 50% compared to the surface expression of the surface polypeptide in the cell mixture under similar conditions but not contacted with the gene vector. The surface polypeptide is typically a binding partner of a binding polypeptide present on the surface of the gene vector. In some embodiments, the surface polypeptide is a TCR complex polypeptide. In some embodiments, the TCR complex polypeptide is CD3D, CD3E, CD3G, CD3Z, TCRα, or TCRβ. In illustrative embodiments, the binding partner is CD3 and the binding polypeptide is anti-CD3.

[0311] Because the level of expression of a binding polypeptide on the surface of a polynucleotide vector (sometimes referred to herein as a “gene vector”) will vary between different binding polypeptides and between polynucleotide vector preparations, the ability of a polynucleotide vector to reduce surface expression of a surface polypeptide should be determined for each preparation of a polynucleotide vector. In some embodiments, the ability of a polynucleotide vector to reduce surface expression of a surface polypeptide is determined based on target cell number. In some embodiments, the ability of a polynucleotide vector to reduce surface expression of a surface polypeptide is based on the volume the cells. In any of the aspects and embodiments herein, the reduction of surface expression of a surface polypeptide can be referred to as dimming the surface polypeptide. For example, if the surface expression of CD3 on a cell is reduced, then CD3 is dimmed on that cell and the cell can be called CD3-, even though the cell may still contain CD3 not expressed on its surface. Not to be limited by theory, T cells that temporarily internalize and dim CD3 are T cells and will eventually re-express CD3 on their cell surfaces such that they are again CD3+.

[0312] Accordingly, provided herein in one aspect, is a method for determining an amount of a polynucleotide vector preparation to dim surface expression of a surface polypeptide by a dimming percentage on cells in a dimming volume, comprising:
[0313] a) forming a plurality of reaction mixtures comprising a plurality of volumes of the polynucleotide vector preparation and a plurality of volumes of a cell mixture, wherein at least two of the reaction mixtures in the plurality of reaction mixtures comprise different volumes of the polynucleotide vector preparation and/or the cell mixture, wherein the cell mixture comprises a plurality of cells comprising the surface polypeptide on their surfaces, and wherein the polynucleotide vector preparation comprises a plurality of polynucleotide vectors comprising a binding polypeptide on their surfaces capable of binding the surface polypeptide;
[0314] b) incubating the reaction mixtures;
[0315] c) measuring the surface expression of the surface polypeptide in the reaction mixtures and in an uncontacted volume of the cell mixture, wherein the uncontacted volume of the cell mixture is not contacted with the polynucleotide vector preparation; and
[0316] d) determining the amount of the polynucleotide vector preparation to dim the dimming percentage of cells in the dimming volume the measured surface expression of the surface polypeptide in the reaction mixtures, the measured surface expression of the surface polypeptide in the uncontacted volume of the cell mixture, and the amounts of the polynucleotide vector preparation and the cell mixture in the reaction mixtures.

[0317] In some embodiments, the amounts of the cell mixture in the reaction mixtures is based on volume. In some embodiments, amounts of the cell mixture in the reaction mixtures is based on numbers of target cells. In some embodiments, the polynucleotide vector preparation is a viral preparation. In illustrative embodiments, the viral preparation is a replication incompetent recombinant retroviral particle preparation. In some embodiments, the dimming percentage (percentage of cells dimmed) is 50%, 60%, 70%, 75%, 80%, 85%, 90%, 95%, 96%, or 97%. In illustrative embodiments, the dimming percentage is at least or about 80%, 85%, 90%, or 95%. In some embodiments, the dimming volume is 0.25 ml, 0.5 ml, 0.75 ml, 1 ml, 2 ml, 3 ml, 4 ml, 5 ml, 10 ml, 15 ml, 20 ml, or 25 ml. In some embodiments, the surface polypeptide can be CD3D, CD3E, CD3G, CD3Z, TCRα, TCRβ, CD16A, NKp46, 2B4, CD2, DNAM, or NKG2C, NKG2D, NKG2E, NKG2F, and/or NKG2H. In some embodiments, the surface polypeptide is a TCR complex polypeptide. In some embodiments, the TCR complex polypeptide is CD3D, CD3E, CD3G, CD3Z, TCRα, or TCRβ. In illustrative embodiments, the surface polypeptide is CD3E. In some embodiments, the binding polypeptide can be any of the activation elements disclosed in the Activation Elements section herein. In such embodiments, the surface polypeptide can be the binding partner of the activation element.

[0318] In illustrative embodiments, the cell mixture is whole blood. In further illustrative embodiments, the cell mixture has been subjected to a red blood cell depletion procedure. In some embodiments, the whole blood is collected from a healthy subject, e.g., a subject that does not have or is not known or suspected to have a disease, disorder, or condition associated with associated with an elevated expression of an antigen. In some embodiments, the whole blood is collected from a subject with a disease, disorder, or condition associated with associated with an elevated expression of an antigen, wherein the polynucleotide vector will be administered to the subject or other subjects with the disease disorder, or condition. In some embodiments, the whole blood is collected from each subject and the Dimming Units are calculated for each subject individually.

[0319] In some embodiments, the reaction mixtures can be incubated for less than or about 24, 12, 10, 8, 6, 4, or 2 hours or 60, 45, 30, 15, 10, or 5 minutes, or for just an initial contacting. In some embodiments, the reaction mixtures can be incubated for between 10 minutes and 24 hours, or between 10 minutes and 8 hours, or for between 1 hour and 8 hours, or for between 1 hour and 6 hours, or in illustrative embodiments, for between 3.5 and 4.5 hours or for 4 hours. In some embodiments, the reaction mixtures can be incubated at about 10° C., 15° C., 20° C., 25° C., 30° C., 37° C., or 42° C. In some embodiments, the reaction mixtures are incubated without CO₂. In illustrative embodiments, the reaction mixtures are incubated with 5% CO₂.

[0320] In some embodiments, the surface expression of the surface polypeptide is measured by fluorescence-activated cell sorting (FACS) method. In some embodiments, the antibody used in a FACS method is GMP. In some embodiments, a CD3 antibody is used to determine surface expression of the surface polypeptide. In some embodiments, the CD3 antibody is UCHT1, OKT-3, HIT3A, TRX4, X35-3, VIT3, BMA030 (BW264/56), CLB-T3/3, CRIS7, YTH12.5, F111409, CLB-T3.4.2, TR-66, TR66.opt, HuM291, WT31, WT32, SPv-T3b, 11D8, XIII-141, XIII46, XIII-87, 12F6, T3/RW2-8C8, T3/RW24B6, OKT3D, M-T301, SMC2, F101.01, and SK7. In illustrative embodiments, the CD3 antibody is PerCP Mouse Anti-Human CD3 — Clone SK7 (BD, 347344). In some embodiments, before measuring the surface expression of the surface polypeptide, cells present in the cell mixture are separated from unbound polynucleotide vector in the incubated reaction mixture.

[0321] In an illustrative embodiment of the above method, the polynucleotide vector preparation is a replication incompetent recombinant retroviral particle preparation, the dimming percentage is 50%, the dimming volume is 1 ml, the surface polypeptide is CD3, the cell mixture is whole blood collected from a healthy subject, and the reaction mixture is incubated for 4 hours at 37° C. and 5% CO₂ and the method is used to calculate Dimming Units.

[0322] Such methods can be used to determine the amount of retroviral particles in a polynucleotide vector preparation that reduces surface polypeptide expression on cells by a specific percentage. This amount can then be used to determine an amount of the preparation of retroviral particles to use for subsequent transductions of whole blood, isolated PBMCs, or isolated TNCs. In any of the aspects and embodiments provided herein that include genetically modifying and/or transducing lymphocytes, the amount of a preparation of polynucleotide vector, for example replication incompetent recombinant retroviral particles, to add to the lymphocytes can be determined using the method above.

[0323] Dimming Units (DUs) can be used in any of the aspects or embodiments herein that include a contacting step to determine the amount of polynucleotide vector to add. As 1 DU of polynucleotide vector reduces the surface expression of the surface polypeptide by 50% in a 1 ml volume of cells, 10 DUs of polynucleotide vector reduces the surface expression of the surface polypeptide by 50% in 10 ml of a cell mixture. In some embodiments, sufficient DUs are added to a volume of cells to reduce surface expression of the surface polypeptide, for example CD3, by greater than 50%, 60%, 70%, 75%, 80%, 85%, 90%, 95%, 96%, or 97% after contacting with the polynucleotide vector compared to the surface expression of the surface polypeptide in the cell mixture under similar conditions but not contacted with the polynucleotide vector. In illustrative embodiments, sufficient DUs are added to a volume of cells to reduce surface expression of the surface polypeptide by greater than 80%, 85%, 90%, or 95% after contacting with the polynucleotide vector compared to the surface expression of the surface polypeptide in the cell mixture under similar conditions but not contacted with the polynucleotide vector. In some embodiments, at least 1, 2, 3, 4, 5, 6, 7, 8, 9, 10, 11,12, 13, 14, 15, 16, 17, 18, 19 or 20 DU are added per ml of cell mixture. In illustrative embodiments, between 5 and 20 DU, 5 and 15 DU, 10 and 20 DU, or 13 and 18 DU are added per ml of cell mixture. In some embodiments, at least 1, 2, 3, 4, 5, 6, 7, 8, 9, 10, 11,12, 13, 14, 15, 16, 17, 18, 19 or 20 DU are added per 1,000,000 target cells. In some embodiments, the target cells are lymphocytes, for example T cells or NK cells. In illustrative embodiments, the cells are in whole blood, isolated PBMCs, or isolated TNCs. In further illustrative embodiments, the cells are the remaining fraction of whole blood after lysing red blood cells. In some embodiments, sufficient DUs are added to dim a population of cells a specific percentage, for example, to dim CD3 on a population of T cells by greater than 50%, 60%, 70%, 75%, 80%, 85%, 90%, 95%, 96%, or 97%. In some embodiments, sufficient dimming units of a polynucleotide vector, and in illustrative embodiments RIP are present to increase the percentage of surface dimmed surface polypeptide, and in illustrative embodiments dimmed surface CD3-, in a population of cells, and in illustrative embodiments T cells, to at least 50%, 60%, 70%, 75%, 80%, 85%, 90%, 95%, 96%, or 97%. In any of the aspects and embodiments herein that include cells contacted with a polynucleotide vector, the composition including cells can include at least 1, 2, 3, 4, 5, 6, 7, 8, 9, 10, 11,12, 13, 14, 15, 16, 17, 18, 19 or 20 DU per ml of the cells, for example at least 1, 2, 3, 4, 5, 6, 7, 8, 9, 10, 11,12, 13, 14, 15, 16, 17, 18, 19 or 20 DU per ml of blood, cell formulation, population if cells.

[0324] In illustrative embodiments, this contacting, and the reaction mixture in which the contacting occurs, takes place within a closed cell processing system, as discussed in more detail herein. A packaging cell, and in illustrative embodiments a packaging cell line, and in particularly illustrative embodiments a packaging cell provided in certain aspects herein, can be used to produce the replication incompetent recombinant retroviral particles. The cells in the reaction mixture can be PBMCs or TNCs, and/or in reaction mixture aspects herein that provide compositions and methods for transducing lymphocytes in whole blood, an anticoagulant and/or an additional blood component, including additional types of blood cells that are not PBMCs, can be present as discussed herein. In fact, in illustrative embodiments of these composition and method aspects for transducing lymphocytes in whole blood, the reaction mixture can essentially be whole blood, and typically an anticoagulant, retroviral particles, and a relatively small amount of the solution in which the retroviral particles were delivered to the whole blood.

[0325] In reaction mixtures that relate to composition and method aspects for modifying lymphocytes in whole blood provided herein, lymphocytes, including NK cells and T cells, can be present at a lower percent of blood cells, and at a lower percentage of white blood cells, in the reaction mixture than methods that involve a PBMC enrichment procedure before forming the reaction mixture. For example, in some embodiments of these aspects, more granulocytes or neutrophils are present in the reaction mixture than NK cells or even T cells. Details regarding compositions of anticoagulants and one or more additional blood components present in the reaction mixtures of aspects for modifying lymphocytes in whole blood, are provided in detail in other sections herein. In some reaction mixture provided herein, T cells can be for example, between 10, 20, 30, or 40% of the lymphocytes of the reaction mixture on the low end of the range, and between 40, 50, 60, 70, 80, or 90% of the lymphocytes of the reaction mixture on the high end of the range. In illustrative embodiments, T cells comprise between 10 and 90%, between 20 and 90%, between 30 and 90%, between 40 and 90%, between 40 and 80%, or between 45% to 75% of the lymphocytes. In such embodiments, for example, NK cells can be present at between 1, 2, 3, 4, or 5% of the lymphocytes of the reaction mixture on the low end of the range, and between 5, 6, 7, 8, 9, 10, 11, 12, 13, or 14% of the lymphocytes of the reaction mixture on the high end of the range. In illustrative embodiments, T cells comprise between 1 and 14%, between 2 and 14%, between 3 and 14%, between 4 and 14%, between 5 and 14%, between 5 to 13%, between 5 to 12%, between 5 to 11% or between 5 to 10% of the lymphocytes of the reaction mixture. In some embodiments, T cells can be at least 1%, 2%, 3%, 4%, 5%, 6%, 7%, 8%, 9%, 10%, 15%, 20%, 30%, 40%, 50%, 60%, 70%, 80%, 90%, 95%, 96%, 97%, 98%, or 99% of the reaction mixture.As disclosed herein, composition and method aspects for transducing lymphocytes in whole blood typically do not involve any blood fractionation such as a PBMC enrichment step of a blood sample, before lymphocytes from the blood sample are contacted with recombinant nucleic acid vectors, for example retroviral particles, in the reaction mixtures disclosed herein for those aspects. Thus, in some embodiments, lymphocytes in unfractionated whole blood, are contacted with recombinant retroviral particles. However, in some embodiments, especially for some aspects in the Self-Driving CAR Methods and Compositions section herein, neutrophils/granulocytes are separated away from other blood cells before the cells are contacted with replication incompetent recombinant retroviral particles. In some embodiments, peripheral blood mononuclear cells (PBMCs) including peripheral blood lymphocytes (PBLs) such as T cell and/or NK cells, are isolated away from other components of a blood sample using for example, a PBMC enrichment procedure, before they are combined into a reaction mixture with retroviral particles. A skilled artisan will understand various methods known in the art can be used to enrich different blood fractions containing T cells and/or NK cells.

[0326] A PBMC enrichment procedure is a procedure in which PBMCs are enriched at least 25-fold, and typically at least 50-fold from other blood cell types. For example, it is believed that PBMCs make up less than 1% of blood cells in whole blood. After a PBMC enrichment procedure, at least 30%, and in some examples as many as 70% of cells isolated in the PBMC fraction are PBMCs. It is possible that even higher enrichment of PBMCs is achieved using some PBMC enrichment procedures. Various different PBMC enrichment procedures are known in the art. For example, a PBMC enrichment procedure is a ficoll density gradient centrifugation process that separates the main cell populations, such as lymphocytes, monocytes, granulocytes, and red blood cells, throughout a density gradient medium. In such a method the aqueous medium includes ficoll, a hydrophilic polysaccharide that forms the high density solution. Layering of whole blood over or under a density medium without mixing of the two layers followed by centrifugation will disperse the cells according to their densities with the PBMC fraction forming a thin white layer at the interface between the plasma and the density gradient medium (see e.g., Panda and Ravindran (2013) Isolation of Human PBMCs. BioProtoc. Vol. 3(3)). Furthermore, centripetal forces can be used to separate PBMCs from other blood components, in ficoll using the spinning force of a Sepax cell processing system.

[0327] In some embodiments, apheresis, for example leukapheresis, can be used to isolate cells, such as PBMCs. For example, AMICUS RBCX (Fresenius-Kabi) and Trima Accel (Terumo BCT) apheresis devices and kits can be used. Cells isolated by apheresis typically contain T cells, B cells, NK cells, monocytes, granulocytes, other nucleated white blood cells, red blood cells, and/or platelets. The cells collected by apheresis can be washed to remove the plasma fraction and to place the cells in an appropriate buffer or media, such as phosphate buffered saline (PBS) or wash solution lacks calcium and may lack magnesium or may lack many if not all divalent cations, for subsequent processing steps. In some embodiments, the cells collected by apheresis can be genetically modified by any of the methods provided herein. In some embodiments, the cells collected by apheresis can be used to prepare any of the cell formulations provided herein. In some embodiments, the cells collected by apheresis can be resuspended in a variety of biocompatible buffers, such as, for example, Ca-free, Mg-free PBS. Alternatively, the undesirable components of the sample containing the cells collected by apheresis can be removed and the cells resuspended in culture media. In some embodiments, leukopheresis can be used to isolate cells, such as lymphocytes. In any of the embodiments provided herein that includes PBMCs, a leukopak can be used. In any embodiment that includes TNCs, a buffy coat can be used. In another PBMC enrichment method, an automated leukapheresis collection system (such as SPECTRA OPTIA® APHERESIS SYSTEM from Terumo BCT, Inc. Lakewood, CO 80215, USA) is used to separate the inflow of whole blood from the target PBMC fraction using high-speed centrifugation while typically returning the outflow material, such as plasma, red blood cells, and granulocytes, back to the donor, although this returning would be optional in methods provided herein. Further processing may be necessary to remove residual red blood cells and granulocytes. Both methods include a time intensive purification of the PBMCs, and the leukapheresis method requires the presence and participation of the patient during the PBMC enrichment step.

[0328] As further non-limiting examples of PBMC enrichment procedures, in some embodiments for methods of transducing, genetically modifying, and/or modifying herein, PBMCs are isolated using a Sepax or Sepax 2 cell processing system (BioSafe). In some embodiments, the PBMCs are isolated using a CliniMACS Prodigy cell processor (Miltenyi Biotec). In some embodiments, an automated apheresis separator is used which takes blood from the subject, passes the blood through an apparatus that sorts out a particular cell type (such as, for example, PBMCs), and returns the remainder back into the subject. Density gradient centrifugation can be performed after apheresis. In some embodiments, the PBMCs are isolated using a leukoreduction filter assembly. In some embodiments, magnetic bead activated cell sorting is then used for purifying a specific cell population from PBMCs, such as, for example, PBLs or a subset thereof, according to a cellular phenotype (i.e., positive selection), before they are used in a reaction mixture herein.

[0329] Other methods for purification can also be used, such as, for example, substrate adhesion, which utilizes a substrate that mimics the environment that a T cell encounters during recruitment, to purify T cells before adding them to a reaction mixture, or negative selection can be used, in which unwanted cells are targeted for removal with antibody complexes that target the unwanted cells for removal before a reaction mixture for a contacting step is formed. In some embodiments, red blood cell rosetting can be used to remove red blood cells before forming a reaction mixture. In other embodiments, hematopoietic stem cells can be removed before a contacting step, and thus in these embodiments, are not present during the contacting step. In some embodiments herein, especially for compositions and methods for transducing lymphocytes in whole blood, an ABC transporter inhibitor and/or substrate is not present before, during, or both before and during the contacting (i.e., not present in the reaction mixture in which contacting takes place) with or without optional incubating, or any step of the method.

[0330] In certain embodiments for any aspects provided herein, lymphocytes are modified and in illustrative embodiments genetically modified and/or transduced with prior activation and/or stimulation and cultured ex vivo until a desired number of cells to be delivered are achieved. In certain illustrative embodiments for any aspects provided herein, lymphocytes are modified and in illustrative embodiments genetically modified and/or transduced without prior activation or stimulation, and/or without requiring prior activation or stimulation, whether in vivo, in vitro, or ex-vivo; and/or furthermore, in some embodiments, without ex vivo or in vitro activation or stimulation after an initial contacting with or without an optional incubation, or without requiring ex vivo or in vitro activation or stimulation after an initial contacting with or without an optional incubation. In certain illustrative embodiments, the cell is activated during the contacting and is not activated at all or not activated for more than 15 minutes, 30 minutes, 1, 2, 4, or 8 hours before the contacting. In certain illustrative embodiments, activation by elements that are not present on the retroviral particle surface is not required for modifying, genetically modifying, and/or transducing the cell. Accordingly, such activation or stimulation elements are not required other than on the retroviral particle, before, during, or after the contacting. Thus, as discussed in more detail herein, these illustrative embodiments that do not require pre-activation or stimulation provide the ability to rapidly perform in vitro experiments aimed at better understanding T cells and the biologicals mechanisms, therein. Furthermore, such methods provide for much more efficient commercial production of biological products produced using PBMCs, lymphocytes, T cells, or NK cells, and development of such commercial production methods. Finally, such methods provide for more rapid ex vivo processing of lymphocytes (e.g., NK cells and especially T cells) for adoptive cell therapy, fundamentally simplifying the delivery of such therapies, for example by providing rapid point-of-care (rPOC) methods. In illustrative embodiments, some, most, at least 25%, 50%, 60%, 70%, 75%, 80%, 90%, 95%, or 99%, or all of the lymphocytes are resting when they are combined with retroviral particles to form a reaction mixture, and typically are resting when they are contacted with retroviral viral particles in a reaction mixture. In methods for modifying lymphocytes such as T cells and/or NK cells in blood or a component thereof, lymphocytes can be contacted in the typically resting state they were in when present in the collected blood in vivo immediately before collection. In some embodiments, the T cells and/or NK cells consist of between 95 and 100% resting cells (Ki-67⁻). In some embodiments, the T cell and/or NK cells that are contacted by replication incompetent recombinant retroviral particles include between 90, 91, 92, 93, 94, and 95% resting cells on the low end of the range and 96, 97, 98, 99, or 100% resting cells on the high end of the range. In some embodiments, the T cells and/or NK cells include naïve cells. In some illustrative embodiments, the subembodiments in this paragraph are included in composition and method aspects for transducing lymphocytes in whole blood.

[0331] In illustrative embodiments of aspects herein that include replication incompetent recombinant retroviral particles, contact between the T cells and/or NK cells and the replication incompetent recombinant retroviral particles can facilitate transduction of the T cells and/or NK cells by the replication incompetent recombinant retroviral particles. Not to be limited by theory, during the period of contact, the replication incompetent recombinant retroviral particles identify and bind to T cells and/or NK cells and the T cells and NK cells are “modified” as the term is used herein. At this point the retroviral and host cell membranes start to fuse, and any retroviral pseudotyping elements and/or T cell activation elements, including anti-CD3 antibodies, become integrated into the surface of the modified T cells and/or NK cells. Then, as a next step in the process of transduction, genetic material from the replication incompetent recombinant retroviral particles enters the T cells and/or NK cells at which time the T cells and/or NK cells are “genetically modified” as the phrase is used herein. It is noteworthy that such process might occur hours or even days after the contacting is initiated, and even after non-associated retroviral particles are rinsed away. Then the genetic material is typically integrated into the genomic DNA of the T cells and/or NK cells, at which time the T cells and/or NK cells are now “transduced” as the term is used herein. Similarly, cells can be modified, genetically modified, and/or transduced by recombinant vectors other than replication incompetent recombinant retroviral particles. Cells may also internalize and integrate genetic material into the genomic DNA of the T cells and/or NK cells after transfection, at which time the T cells and/or NK cells are now “stably transfected” as the term is used herein. Accordingly, in illustrative embodiments, any method for modifying and/or genetically modifying lymphocytes (e.g., T cells and/or NK cells) herein, is a method for transducing lymphocytes (e.g., T cells and/or NK cells). It is believed that by day 6 in vivo or ex vivo, after contacting is initiated, the vast majority of modified and genetically modified cells have been transduced. Methods of lentiviral transduction are known. Exemplary methods are described in, e.g., Wang et al. (2012) J. Immunother. 35(9): 689-701; Cooper et al. (2003) Blood. 101: 1637-1644; Verhoeyen et al. (2009) Methods Mol Biol. 506: 97-114; and Cavalieri et al. (2003) Blood. 102(2): 497-505. Throughout this disclosure, a transduced, or in some embodiments a stably transfected, T cell and/or NK cell includes progeny of ex vivo transduced cells that retain at least some of the nucleic acids or polynucleotides that are incorporated into the genome of a cell during the ex vivo transduction. In methods herein that recite “reintroducing” a transduced cell, it will be understood that such cell is typically not in a transduced state when it is collected from the blood of a subject.

[0332] Although in illustrative embodiments, T cells and/or NK cells are not activated prior to being contacted with a recombinant retrovirus in methods herein, a T cell activation element in illustrative embodiments is present in the reaction mixture where initial contacting of a recombinant retrovirus and lymphocytes occurs. For example, such T cell activation element can be in solution in the reaction mixture. For example, soluble anti-CD3 antibodies can be present in the reaction mixture during the contacting and optional incubation thereafter, at 25-200, 50-150, 75-125, or 100 ng/ml. In illustrative embodiments, the soluble anti-CD3 antibodies are multivalent such as bivalent, tetravalent, or a higher order valency. In illustrative embodiments, the T cell activation element is associated with the retroviral surface. The T cell activation element can be any T cell activation element provided herein. In illustrative embodiments, the T cell activation element can be anti-CD3, such as anti-CD3 scFv, or anti-CD3 scFvFc. Accordingly, in some embodiments, the replication incompetent recombinant retroviral particle can further include a T cell activation element, which in further illustrative examples is associated with the external side of the surface of the retrovirus.

[0333] The contacting step of a method for transducing and/or a method for modifying or genetically modifying lymphocytes in whole blood, provided herein, typically includes an initial step in which the retroviral particle, typically a population of retroviral particles, are brought into contact with blood cells, typically a population of blood cells that includes an anticoagulant and/or additional blood components other than PBMCs, that are not present after a PBMC enrichment procedure, while in suspension in a liquid buffer and/or media to form a transduction reaction mixture. This contacting, as in other aspects provided herein, can be followed by an optional incubating period in this reaction mixture that includes the retroviral particles and the blood cells comprising lymphocytes (e.g., T cells and/or NK cells) in suspension. In methods for modifying T cells and/or NK cells in blood or a component thereof, the reaction mixture can include at least one, two, three, four, five, or all additional blood components as disclosed herein, and in illustrative embodiments includes one or more anticoagulants.

[0334] The transduction reaction mixture in any of the aspects provided herein can be incubated at between 23 and 39° C., and in some illustrative embodiments at 37° C., in an optional incubation step after the initial contacting of retroviral particles and lymphocytes. In certain embodiments, the transduction reaction can be carried out at 37-39° C. for faster fusion/transduction. In some embodiments, the contacting step is a cold contacting step as discussed elsewhere herein, with an optional incubating step. In some embodiments, the cold contacting step is performed at temperatures less than 37° C., such as between 1° C. and 25° C. or 2° C. and 6° C. The optional incubating associated with the contacting step at these temperatures can be performed for any length of time discussed herein, for example in the Exemplary Embodiments section. In illustrative embodiments, the optional incubating associated with these temperatures is performed for 8 hours, 6 hours, 4 hours, 2 hours, and in illustrative embodiments 1 hour or less.

[0335] In some embodiments, including illustrative embodiments where contacting is performed on a filter, the contacting is carried out at a lower temperature, for example between 2° C. and 25° C., referred to herein as cold contacting, and then retroviral particles that remain unassociated in suspension are removed from the reaction mixture, for example by washing the reaction mixture over a filter, such as a leukoreduction filter, that retains leukocytes including T cells and NK cells, but not free, unassociated viral particles. The cells and retroviral particles when brought into contact in the transduction reaction mixture can be immediately processed to remove the retroviral particles that remain free in suspension and not associated with cells, from the cells. Optionally, the cells in suspension and retroviral particles whether free in suspension or associated with the cells in suspension, can be incubated for various lengths of time, as provided herein for a contacting step in a method provided herein. Before further steps, a wash can be performed, regardless of whether such cells will be studied in vitro, ex vivo or introduced into a subject. Such suspension can include allowing cells and retroviral particles to settle or causing such settling through application of a force, such as a centrifugal force, to the bottom of a vessel or chamber, as discussed in further detail herein. In illustrative embodiments, such g force is lower than the g forces used successfully in spinoculation procedures. Further contacting times and discussions regarding contacting and the optional incubation, are discussed further herein, for example in the Exemplary Embodiments section.

[0336] Current methods requiring extensive periods of ex vivo expansion of genetically modified lymphocytes before formulation and reintroduction into a subject can be utilized in some embodiments of the methods herein that include modifying such cells using a polynucleotide that include nucleic acids that encode an anti-idiotype polypeptide. There is a long-felt need for effective point-of-care adoptive cellular therapy that would allow a subject to have blood drawn (collected), lymphocytes modified and reintroduced in a single visit. In some embodiments, the methods provided herein allow for rapid ex vivo processing of lymphocytes, and in certain illustrative embodiments, PBMCs, and in other illustrative embodiments, total nucleated cells (TNCs), without an ex vivo expansion step, fundamentally simplifying the delivery of adoptive cell therapies, for example by providing such point-of-care methods, and in some illustrative embodiments, in shorter periods of time (rapid point-of-care (rPOC)). Illustrative methods are disclosed herein for modifying lymphocytes, especially NK cells and in illustrative embodiments, T cells, that are much shorter and simpler than prior methods. Accordingly, in some embodiments, the contacting step in any method provided herein of transducing, genetically modifying, and/or modifying a PBMC or a lymphocyte, typically a T cell and/or an NK cell, can be performed (or can occur) for any of the time periods provided in this specification, included, but not limited to those provided in the Exemplary Embodiments section. For example, said contacting can be for less than 24 hours, for example, less than 12 hours, less than 8 hours, less than 4 hours, less than 2 hours, less than 1 hour, less than 30 minutes or less than 15 minutes, but in each case there is at least an initial contacting step in which retroviral particles and cells come into contact in suspension in a transduction reaction mixture before retroviral particles that remain in suspension not associated with a cell, are separated from cells and typically discarded, as discussed in further detail herein. It should be noted, but not intending to be limited by theory, that it is believed that contacting begins at the time that retroviral particles and lymphocytes are combined together, typically by adding a solution containing the retroviral particles into a solution containing lymphocytes (e.g., T cells and/or NK cells).

[0337] After initial contacting, including initial cold contacting, in some embodiments there is an incubating of the reaction mixture containing cells and recombinant nucleic acid vectors, which in illustrative embodiments include nucleic acids that encode an anti-idiotype polypeptide, and in further illustrative embodiments are retroviral particles, in suspension for a specified time period without removing recombinant nucleic acid vectors (e.g., retroviral particles) that remain free in solution and not associated with cells. This incubating is sometimes referred to herein as an optional incubation. Thus, in illustrative embodiments, the contacting (including initial contacting and optional incubation) can be performed (or can occur) for between 15 minutes and 12 hours, between 15 minutes and 10 hours, or between 15 minutes and 8 hours, or any of the times included in the Exemplary Embodiments section. In certain embodiments that comprise a cold contacting step, a secondary incubation is performed by suspending cells after an optional wash step such that recombinant nucleic acid vectors, and in illustrative embodiments retroviral particles, that are not associated with a cell are washed away. In illustrative embodiments, the secondary incubation is performed at temperatures between 32° C. and 42° C., such as at 37° C. The optional secondary incubation can be performed for any length of time discussed herein. In illustrative embodiments, the optional secondary incubation is performed for 6 hours or less. Thus, in illustrative embodiments, the contacting (including initial contacting and optional incubation) can be performed (or can occur) (where as indicated in general herein the low end of a selected range is less than the high end of the selected range) for between 30 seconds or 1, 2, 5, 10, 15, 30, or 45 minutes, or 1, 2, 3, 4, 5, 6, 7, or 8 hours on the low end of the range, and between 10 minutes, 15 minutes, 30 minutes, or 1, 2, 4, 6, 8, 10, 12, 18, 24, 36, 48, and 72 hours on the high end of the range. Thus, in some embodiments, after the time when a reaction mixture is formed by adding retroviral particles to lymphocytes, the reaction mixture can be incubated for between 5 minutes on the low end of the range and 10, 15, or 30 minutes or 1, 2, 3, 4, 5, 6, 8, 10 or 12 hours on the high end of the range. In other embodiments, the reaction mixture can be incubated for between 15 minutes and 12 hours, 15 minutes and 10 hours, 15 minutes and 8 hours, 15 minutes and 6 hours, 15 minutes and 4 hours, 15 minutes and 2 hours, 15 minutes and 1 hour, 15 minutes and 45 minutes, or 15 minutes and 30 minutes. In other embodiments, the reaction mixture can be incubated for between 30 minutes and 12 hours, 30 minutes and 10 hours, 30 minutes and 8 hours, 30 minutes and 6 hours, 30 minutes and 4 hours, 30 minutes and 2 hours, 30 minutes and 1 hour, or 30 minutes and 45 minutes. In other embodiments, the reaction mixture can be incubated for between 1 hour and 12 hours, 1 hour and 8 hours, 1 hour and 4 hours, or 1 hour and 2 hours. In another illustrative embodiment, the contacting is performed for between an initial contacting step only (without any further incubating in the reaction mixture including the retroviral particles free in suspension and cells in suspension) without any further incubation in the reaction mixture, or a 5 minute, 10 minute, 15 minute, 30 minute, or 1 hour incubation in the reaction mixture.

[0338] After the indicated time period for the initial contacting and optional incubation that can be part of the contacting step, blood cells or a T cell and/or NK cell-containing fraction thereof in the reaction mixture, are separated from retroviral particles that are not associated with such cells. For example, this can be performed using a PBMC enrichment procedure (e.g., a Ficoll gradient in a Sepax unit), or in certain illustrative embodiments provided herein, by filtering the reaction mixture over a leukocyte depletion filter set assembly, and then collecting the leukocytes, which include T cells and NK cells. In another embodiment, this can be performed by centrifugation of the reaction mixture at a relative centrifugal force less than 500 g, for example 400 g, or between 300 and 490 g, or 350 and 450 g. Such centrifugation to separate retroviral particles from cells can be performed for example, for between 5 minutes and 15 minutes, or between 5 minutes and 10 minutes. In illustrative embodiments where centrifugal force is used to separate cells from retroviral particles that are not associated with cells, such g force is typically lower than the g forces used successfully in spinoculation procedures.

[0339] In some illustrative embodiments, a method provided herein in any aspect, does not involve performing a spinoculation. In such embodiments, the cell or cells are not subjected to a spinoculation of at least 400 g, 500 g, 600 g, 700 g, or 800 g for at least 15 minutes. In some embodiments, the cell or cells are not subjected to a spinoculation of at least 800 g for at least 10, 15, 20, 25, 30, 35, 40, or 45 minutes. In some embodiments, spinoculation is included as part of a contacting step. In illustrative embodiments, when spinoculation is performed there is no additional incubating as part of the contacting, as the time of the spinoculation provides the incubation time of the optional incubation discussed above. In other embodiments, there is an additional incubation after the spinoculating of between 15 minutes and 4 hours, 15 minutes and 2 hours, or 15 minutes and 1 hour. The spinoculation can be performed for example, for 30 minutes to 120 minutes, typically for at least 60 minutes, for example for 60 minutes to 180 minutes, or 60 minutes to 90 minutes. The spinoculation is typically performed in a centrifuge with a relative centrifugal force of at least 800 g, and more typically at least 1200 g, for example between 800 g and 2400 g, 800 g and 1800 g, 1200 g and 2400 g, or 1200 g and 1800 g. After the spinoculation, such methods typically involve an additional step of resuspending the pelleted cells and retroviral particles, and then removing retroviral particles that are not associated with cells according to steps discussed above when spinoculation is not performed.

[0340] The contacting step including the optional incubation therein, and the spinoculation, in embodiments that include spinoculation, can be performed at between 4° C. and 42° C. or 20° C. and 37° C. In certain illustrative embodiments, spinoculation is not performed and the contacting and associated optional incubation are carried out at 20-25° C. for 4 hours or less, 2 hours or less, 1 hour or less, 30 minutes or less, 15 minutes or less, or 15 minutes to 2 hours, 15 minutes to 1 hour, or 15 minutes to 30 minutes.

[0341] Methods of genetically modifying lymphocytes provided according to any method herein, typically include insertion into the cell of a polynucleotide comprising one or more transcriptional units encoding any transgene, for example one, two, three or all of an anti-idiotype polypeptide, a cytokine a CAR, and a lymphoproliferative element, and in illustrative embodiments includes nucleic acids encoding the anti-idiotype polypeptide according to any of the embodiments provided herein. Such anti-idiotype polypeptide, CAR and lymphoproliferative element can be provided to support the shorter and more simplified methods provided herein, which can support expansion of modified, genetically modified, and/or transduced T cells and/or NK cells after the contacting and optional incubation. Accordingly, in exemplary embodiments of any methods provided herein, lymphoproliferative elements can be delivered from the genome of the retroviral particles inside genetically modified, and/or transduced T cells and/or NK cells, such that those cells have the characteristics of increased proliferation and/or survival disclosed in the Lymphoproliferative Elements section herein. In exemplary embodiments of any methods provided herein, the genetically modified T cell or NK cell is capable of engraftment in vivo in mice and/or enrichment in vivo in mice for at least 7, 14, or 28 days. A skilled artisan will recognize that such mice may be treated or otherwise genetically modified so that any immunological differences between the genetically modified T cell and/or NK cell do not result in an immune response being elicited in the mice against any component of the lymphocyte transduced by the replication incompetent recombinant retroviral particle.

[0342] Media that can be included in a contacting step, for example when the cells and retroviral particles are initially brought into contact, or in any aspects provided herein, during optional incubation periods with the reaction mixture thereafter that include retroviral particles and cells in suspension in the media, or media that can be used during cell culturing and/or during various wash steps in any aspects provided herein, can include base media such as commercially available media for ex vivo T cell and/or NK cell culture. Non-limiting examples of such media include, X-VIVO™ 15 Chemically Defined, Serum-free Hematopoietic Cell Medium (Lonza) (2018 catalog numbers BE02-060F, BE02-00Q, BE-02-061Q, 04-744Q, or 04-418Q), ImmunoCult™-XF T Cell Expansion Medium (STEMCELL Technologies) (2018 catalog number 10981), PRIME-XV® T Cell Expansion XSFM (Irvine Scientific) (2018 catalog number 91141), AIM V® Medium CTS™ (Therapeutic Grade) (Thermo Fisher Scientific (Referred to herein as “Thermo Fisher”), or CTS™ Optimizer™ media (Thermo Fisher) (2018 catalog numbers A10221-01 (basal media (bottle)), and A10484-02 (supplement), A10221-03 (basal media (bag)), A1048501 (basal media and supplement kit (bottle)) and, A1048503 (basal media and supplement kit (bag)). Such media can be a chemically defined, serum-free formulation manufactured in compliance with cGMP, as discussed herein for kit components. The media can be xeno-free and complete. In some embodiments, the base media has been cleared by regulatory agencies for use in ex vivo cell processing, such as an FDA 510(k) cleared device. In some embodiments, the media is the basal media with or without the supplied T cell expansion supplement of 2018 catalog number A1048501 (CTS™ OpTmizer™ T Cell Expansion SFM, bottle format) or A1048503 (CTS™ OpTmizer™ T Cell Expansion SFM, bag format) both available from Thermo Fisher (Waltham, MA). Additives such as human serum albumin, human AB+ serum, and/or serum derived from the subject can be added to the transduction reaction mixture. Supportive cytokines can be added to the transduction reaction mixture, such as IL2, IL7, or IL15, or those found in human sera. dGTP can be added to the transduction reaction in certain embodiments.

[0343] In some embodiments of any method herein that includes a step of modifying lymphocytes (e.g., T cells and/or NK cells), the cells can be contacted with a retroviral particle without prior activation. The retroviral particle can include, as non-limiting examples, nucleic acids that encode an anti-idiotype polypeptide. In some embodiments of any method herein that includes a step of genetically modifying T cells and/or NK cells, the T cells and/or NK cells have not been incubated on a substrate that adheres to monocytes for more than 4 hours in one embodiment, or for more than 6 hours in another embodiment, or for more than 8 hours in another embodiment before the transduction. In one illustrative embodiment, the T cells and/or NK cells have been incubated overnight on an adherent substrate to remove monocytes before the transduction. In another embodiment, the method can include incubating the T cells and/or NK cells on an adherent substrate that binds monocytes for no more than 30 minutes, 1 hour, or 2 hours before the transduction. In another embodiment, the T cells and/or NK cells are exposed to no step of removing monocytes by an incubation on an adherent substrate before said transduction step. In another embodiment, the T cells and/or NK cells are not incubated with or exposed to a bovine serum, such as a cell culturing bovine serum, for example fetal bovine serum before or during a contacting step and/or a modifying and/or a genetically modifying and/or transduction step.

[0344] Some or all of the steps of the methods for modifying provided herein, or uses of such methods, in illustrative embodiments, are performed in a closed system. Thus, reaction mixtures formed in such methods, and modified, genetically modified, and/or transduced lymphocytes (e.g., T cells and/or NK cells) made by such methods, can be contained within such a closed system. A closed system is a cell processing system that is generally closed or fully closed to an environment, such as an environment within a room or even the environment within a hood, outside of the conduits such as tubes, and chambers, of the system in which cells are processed and/or transported. One of the greatest risks to safety and regulatory control in the cell processing procedure is the risk of contamination through frequent exposure to the environment as is found in traditional open cell culture systems. To mitigate this risk, particularly in the absence of antibiotics, some commercial processes have been developed that focus on the use of disposable (single-use) equipment. However, even with their use under aseptic conditions, there is always a risk of contamination from the opening of flasks to sample or add additional growth media. To overcome this problem, methods provided herein, which are typically ex vivo methods, are typically performed within a closed-system. Such a process is designed and can be operated such that the product is not exposed to the outside environment. Material transfer occurs via sterile connections, such as sterile tubing and sterile welded connections. Air for gas exchange can occur via a gas permeable membrane, via 0.2 µm filter to prevent environmental exposure. In some illustrative embodiments, the methods are performed on T cells, for example to provide modified and in illustrative embodiments genetically modified T cells.

[0345] Such closed system methods can be performed with commercially available devices. Different closed system devices can be used at different steps within a method and the cells can be transferred between these devices using tubing and connections such as welded, luer, spike, or clave ports to prevent exposure of the cells or media to the environment. For example, blood can be collected into an IV bag or syringe, optionally including an anticoagulant, and in some aspects, transferred to a Sepax 2 device (Biosafe) for PBMC enrichment and isolation. In other embodiments, whole blood can be filtered to collect leukocytes using a leukoreduction filter assembly. The isolated PBMCs or isolated leukocytes can be transferred to a chamber of a G-Rex device for an optional activation, a transduction and optional expansion. Alternatively, collected blood can be transduced in a blood bag, for example, the bag in which it was collected. Finally, the cells can be harvested and collected into another bag using a Sepax 2 device. The methods can be carried out in any device or combination of devices adapted for closed system T cell and/or NK cell production. Non-limiting examples of such devices include G-Rex devices (Wilson Wolf), GatheRex (Wilson Wolf), Sepax 2 (Biosafe), WAVE Bioreactors (General Electric), a CultiLife Cell Culture bag (Takara), a PermaLife bag (OriGen), CliniMACS Prodigy (Miltenyi Biotec), and VueLife bags (Saint-Gobain). In illustrative embodiments, the optional activating, the transducing and optional expanding can be performed in the same chamber or vessel in the closed system. For example, in illustrative embodiments, the chamber can be a chamber of a G-Rex device and PBMCs or leukocytes can be transferred to the chamber of the G-Rex device after they are enriched and isolated, and can remain in the same chamber of the G-Rex device until harvesting.

[0346] Methods provided herein can include transferring blood and cells therein and/or fractions thereof, as well as lymphocytes before or after they are contacted with retroviral particles, between vessels within a closed system, which thus is without environmental exposure. Vessels used in the closed system, for example, can be a tube, bag, syringe, or other container. In some embodiments, the vessel is a vessel that is used in a research facility. In some embodiments, the vessel is a vessel used in commercial production. In other embodiments, the vessel can be a collection vessel used in a blood collection process. Methods for modifying herein, typically involve a contacting step wherein lymphocytes are contacted with a replication incompetent recombinant retroviral particle. The contacting in some embodiments, can be performed in the vessel, for example, within a blood bag. Blood and various lymphocyte-containing fractions thereof, can be transferred from the vessel to another vessel (for example from a first vessel to a second vessel) within the closed system for the contacting. The second vessel can be a cell processing compartment of a closed device, such as a G-Rex device. In some embodiments, after the contacting the modified and in illustrative embodiments genetically modified (e.g., transduced) cells can be transferred to a different vessel within the closed system (i.e., without exposure to the environment). Either before or after this transfer the cells are typically washed within the closed system to remove substantially all or all of the retroviral particles. In some embodiments, a process disclosed herein, from collection of blood, to contacting (e.g., transduction), optional incubating, and post-incubation isolation and optional washing, is performed for between 15 minutes, 30 minutes, or 1, 2, 3, or 4 hours on the low end of the range, and 4, 8, 10, or 12 hours on the high end of the range.

[0347] Various embodiments of this method, as well as other aspects, such as use of NK cells and T cells made by such a method, are disclosed in detail herein. Furthermore, various elements or steps of such method aspects for transducing, genetically modifying, and/or modifying a PBMC, lymphocyte, T cell and/or NK cell, are provided herein, for example in this section and the Exemplary Embodiments section, and such methods include embodiments that are provided throughout this specification, as further discussed herein, For example, embodiments of any of the aspects for transducing, genetically modifying, and/or modifying a PBMC or a lymphocyte, for example an NK cell or in illustrative embodiments, a T cell, provided for example in this section and in the Exemplary Embodiments section, can include any of the embodiments of TIPs provided herein, including those that include one or more anti-idiotype polypeptide, lymphoproliferative element, CAR, pseudotyping element, control element, activation element, membrane-bound cytokine, miRNA, Kozak-type sequence, WPRE element, triple stop codon, and/or other element disclosed herein, and can be combined with methods herein for producing retroviral particles using a packaging cell. In certain illustrative embodiments, the retroviral particle is a lentiviral particle. Such a method for modifying, genetically modifying, and/or transducing a PBMC or a lymphocyte, such as a T cell and/or NK cell can be performed in vitro or ex vivo. A skilled artisan will recognize that details provided herein for transducing, genetically modifying, and/or modifying PBMCs or lymphocytes, such as T cell(s) and/or NK cell(s) can apply to any aspect that includes such step(s).

[0348] Introduction or reintroduction, also referred to herein as administration and readministration, of modified cells, such as modified lymphocytes and in illustrative embodiments genetically modified lymphocytes, or in some embodiments, RIPs into a subject in methods provided herein can be via any route known in the art. Such introduction or reintroduction of genetically modified lymphocytes typically involves suspending i) modified and/or ii) genetically modified and/or iiia) transduced or iiib) transfected cells, in a delivery solution to form a cell formulation that can be introduced or reintroduced into a subject as discussed in further detail herein. Such introduction of RIPs for example, can involve suspension of the RIPs in a delivery solution to form a transducing formulation that can be introduced into a subject. For example, introduction or RIPS, lymphocytes or modified lymphocytes, or reintroduction for lymphocytes or modified lymphocytes, can be delivery via infusion into a blood vessel of the subject. In some embodiments, RIPS or modified lymphocytes (e.g., T cells and/or NK cells) are administered or otherwise introduced, or reintroduced back, for lymphocytes or modified lymphocytes, into a subject by intraperitoneal administration, intratumoral administration, intramuscular administration, or in illustrative embodiments by subcutaneous administration.

[0349] Some administered cells are modified with a nucleic acid encoding a lymphoproliferative element. Not to be limited by theory, in non-limiting illustrative methods, the delivery of a polynucleotide encoding a lymphoproliferative element, to a resting T cell and/or NK cell ex vivo, which can integrate into the genome of the T cell or NK cell, provides that cell with a driver for in vivo expansion without the need for lymphodepleting the host. Thus, in illustrative embodiments, the subject is not exposed to a lymphodepleting agent within 1, 2, 3, 4, 5, 6, 7, 10, 14, 21, or 28 days, or within 1 month, 2 months, 3 months or 6 months of performing the contacting, during the contacting, and/or within 1, 2, 3, 4, 5, 6, 7, 10, 14, 21, or 28 days, or within 1 month, 2 months, 3 months or 6 months after the modified T cells and/or NK cells are reintroduced back into the subject. Furthermore, in non-limiting illustrative embodiments, methods provided herein can be performed without exposing the subject to a lymphodepleting agent during a step wherein a replication incompetent recombinant retroviral particle is in contact with resting T cells and/or resting NK cells of the subject and/or during the entire ex vivo method. Hence, methods of expanding modified and in illustrative embodiments genetically modified T cells and/or NK cells in a subject in vivo is a feature of some embodiments of the present disclosure. In certain embodiments such methods involve ex-vivo propagation of modified cells, and in illustrative embodiments, such methods are ex vivo propagation-free or substantially propagation-free.

[0350] This entire method/process from blood draw from a subject to reintroduction of modified and in illustrative embodiments genetically modified lymphocytes into the subject after ex vivo transduction of T cells and/or NK cells, in non-limiting illustrative embodiments of any aspects provided herein, can occur over a time period less than 48 hours, less than 36 hours, less than 24 hours, less than 12 hours, less than 11 hours, less than 10 hours, less than 9 hours, less than 8 hours, less than 7 hours, less than 6 hours, less than 5 hours, less than 4 hours, less than 3 hours, 2 hours, or less than 2 hours. In any of the embodiments disclosed herein, introduction or reintroduction of the modified lymphocytes can be performed by intravenous injection, intraperitoneal administration, subcutaneous administration, intratumoral, or intramuscular administration. In other embodiments, the entire method/process from blood draw/collection from a subject to reintroduction of modified lymphocytes into the subject after ex vivo transduction of T cells and/or NK cells, in non-limiting illustrative embodiments herein, occurs over a time period between 1 hour and 12 hours, 2 hours and 8 hours, 1 hour and 3 hours, 2 hours and 4 hours, 2 hours and 6 hours, 4 hours and 12 hours, 4 hours and 24 hours, 8 hours and 24 hours, 8 hours and 36 hours, 8 hours and 48 hours, 12 hours and 24 hours, 12 hours and 36 hours, or 12 hours and 48 hours, or over a time period between 15, 30, 60, 90, 120, 180, and 240 minutes on the low end of the range, and 120, 180, and 240, 300, 360, 420, and 480 minutes on the high end of the range. In other embodiments, the entire method/process from blood draw/collection from a subject to reintroduction of modified and in illustrative embodiments genetically modified lymphocytes into the subject after ex vivo transduction of T cells and/or NK cells, occurs over a time period between 1, 2, 3, 4, 6, 8, 10, and 12 hours on the low end of the range, and 8, 9, 10, 11, 12, 14, 18, 24, 36, or 48 hours on the high end of the range. In some embodiments, the modified and genetically modified T cells and/or NK cells are separated from the non-associated replication incompetent recombinant retroviral particles after the time period in which contact occurs.

[0351] Because illustrative embodiments of methods provided herein for modifying lymphocytes, and associated methods for performing adoptive cell therapy can be performed in significantly less time than prior methods, fundamental improvements in patient care and safety as well as product manufacturability are made possible. Therefore, such processes are expected to be favorable in the view of regulatory agencies responsible for approving such processes when carried out in vivo for therapeutic purposes. For example, the subject in non-limiting examples of any aspects provided herein that include a subject, can remain in the same building (e.g., infusion clinic) or room as the instrument processing their blood or sample for the entire time that the sample is being processed before modified T cells and/or NK cells are reintroduced into the patient. In non-limiting illustrative embodiments, a subject remains within line of site and/or within 100, 50, 25, or 12 feet or arm’s distance of their blood or cells that are being processed, for the entire method/process from blood draw/collection from the subject to reintroduction of blood to the subject after ex vivo transduction of T cells and/or NK cells. In other non-limiting illustrative embodiments, a subject remains awake and/or at least one person can continue to monitor the blood or cells of the subject that are being processed, throughout and/or continuously for the entire method/process from blood draw/collection from the subject to reintroduction of blood to the subject after ex vivo transduction of T cells and/or NK cells. Because of improvements provided herein, the entire method/process for adoptive cell therapy and/or for transducing resting T cells and/or NK cells from blood draw/collection from the subject to reintroduction of blood to the subject after ex vivo transduction of T cells and/or NK cells can be performed with continuous monitoring by a human. In other non-limiting illustrative embodiments, at no point the entire method/process from blood draw/collection from the subject to reintroduction of blood to the subject after ex vivo transduction of T cells and/or NK cells, are blood cells incubated in a room that does not have a person present. In other non-limiting illustrative embodiments, the entire method/process from blood draw/collection from the subject to reintroduction of blood to the subject after ex vivo transduction of T cells and/or NK cells, is performed next to the subject and/or in the same room as the subject and/or next to the bed or chair of the subject. Thus, sample identity mix-ups can be avoided, as well as long and expensive incubations over periods of days or weeks. This is further provided by the fact that methods provided herein are readily adaptable to closed and automated blood processing systems, where a blood sample and its components that will be reintroduced into the subject, only make contact with disposable, single-use components.

[0352] Methods for modifying, genetically modifying, and/or transducing cells, such as lymphocytes, and in illustrative embodiments T cells and/or NK cells provided herein, can be part of a method for delivering polynucleotides such as polynucleotide vectors to a subject, for delivering modified cells to a subject, or for performing adoptive cell therapy. In illustrative embodiments, these methods steps of collecting blood from a subject, and returning modified, genetically modified, and/or transduced lymphocytes (e.g., T cells and/or NK cells) to the subject. The present disclosure provides various treatment methods using a CAR, and in illustrative embodiments an anti-idiotype polypeptide, which can be a CAR that has an anti-idiotype extracellular recognition domain. A CAR of the present disclosure, when present in a T lymphocyte or an NK cell, can mediate cytotoxicity toward a target cell. A CAR of the present disclosure binds to an antigen present on a target cell, thereby mediating killing of a target cell by a T lymphocyte or an NK cell genetically modified to produce the CAR. The ASTR of the CAR binds to an antigen present on the surface of a target cell. The present disclosure provides methods of killing, or inhibiting the growth of, a target cell, the method involving contacting a cytotoxic immune effector cell (e.g., a cytotoxic T cell, or an NK cell) that is genetically modified to produce a subject CAR, such that the T lymphocyte or NK cell recognizes an antigen present on the surface of a target cell, and mediates killing of the target cell. The target cell can be a cancer cell, for example, and autologous cell therapy methods herein, can be methods for treating cancer, in some illustrative embodiments. In these embodiments, the subject can be a an animal or human suspected of having cancer, or more typically, a subject that is known to have cancer. In some embodiments for treating a PDL-1 positive cancer, and in illustrative embodiments a PDL-1 positive diffuse large B cell lymphoma (DLBCL), genetically modified cells can be administered in combination with an anti-PDL-1 antibody or antibody mimetic.

[0353] In some illustrative embodiments, cells are introduced or reintroduced into the subject by infusion into a vein or artery, especially when neutrophils are not present in a preparation of lymphocytes that have been contacted with retroviral particles and are ready to be reintroduced, or by subcutaneous, intratumoral, or intramuscular administration, for embodiments where at least 1%, 2%, 3%, 4%, 5%, 7.5%, 10%, 15%, 20% or 25% of the cells, or between 1% and 90%, 1% and 75%, 1% and 50%, 1% and 25%, 1 % and 20%, 1 % and 10%, 5% and 90%, 5% and 75%, 5% and 50%, 5% and 25%, 5% and 20%, 5% and 10%, 10% and 90%, 10% and 75%, 10% and 50%, 10% and 25%, or10% and 20%, of the cells in a cell formulation to be administered are neutrophils. Such embodiments, can include coadministration or sequential administration with hyaluronidase, as discussed in further detail herein. In any of the embodiments disclosed herein, the number of lymphocytes, and in illustrative embodiments modified T cells and/or NK cells, present in cell formulations provided herein and optionally reinfused or in illustrative embodiments, subcutaneously delivered into a subject can be between 1 × 10³, 2.5 × 10³, 5 × 10³, 1 × 10⁴,2.5 × 10⁴,5 × 10⁴, 1 × 10⁵, 2.5 × 10⁵, 5 × 10⁵, 1 × 10⁶, 2.5 × 10⁶, 5 × 10⁶, and 1 × 10⁷ cells/kg on the low end of the range and 5 × 10⁴, 1 × 10⁵, 2.5 × 10⁵, 5 × 10⁵, 1 × 10⁶, 2.5 × 10⁶, 5 × 10⁶, 1 × 10⁷, 2.5 × 10⁷, 5 × 10⁷, 1 × 10⁸, 1 × 10⁹, and 1 × 10¹⁰ cells/kg on the high end of the range. In certain embodiments, the number of lymphocytes, and in illustrative embodiments modified T cells and/or NK cells, present in cell formulations herein and optionally reinfused or otherwise delivered into a subject can be between 1 × 10⁴, 2.5 × 10⁴, 5 × 10⁴, and 1 × 10⁵ cells/kg on the low end of the range and 2.5 × 10⁴, 5 × 10⁴, 1 × 10⁵, 2.5 × 10⁵, 5 × 10⁵, 1 × 10⁶, 1 × 10⁷, 2.5 × 10⁷, 5 × 10⁷, and 1 × 10⁸ cells/kg on the high end of the range, or between 1 × 10⁴ cells/kg on the low end of the range and 2.5 × 10⁴, 5 × 10⁴, 1 × 10⁵, 2.5 × 10⁵, 5 × 10⁵, 1 × 10⁶, 1 × 10⁷, 2.5 × 10⁷ 5 × 10⁷, and 1 × 10⁸ cells/kg on the high end of the range. In some embodiments, the number of lymphocytes, and in illustrative embodiments T cells and/or NK cells present in cell formulations herein and optionally reinfused, or delivered intratumorally, intramuscularly, subcutaneously, or otherwise delivered into a subject can be between 5 × 10⁵, 1 × 10⁶, 2.5 × 10⁶, 5 × 10⁶, 1 × 10⁷, 2.5 × 10⁷, 5 × 10⁷, and 1 × 10⁸ cells on the low end of the range and 2.5 × 10⁶, 5 × 10⁶, 1 × 10⁷, 2.5 × 10⁷ 5 × 10⁷, 1 × 10⁸, 2.5 × 10⁸, 5 × 10⁸, and 1 × 10⁹ cells on the high end of the range. In some embodiments, the number of lymphocytes, and in illustrative embodiments T cells and/or NK cells, present in cell formulations herein and available for infusion, reinfusion, or other delivery means (e.g., subcutaneous delivery) into a 70 kg subject or patient is between 7 × 10⁵ and 2.5 × 10⁸ cells. In other embodiments, the number of lymphocytes, and in illustrative embodiments T cells and/or NK cells present in cell formulations herein and available for transduction is approximately 7 × 10⁶ plus or minus 10%.

[0354] In any of the embodiments and aspects provided herein that include a T cell, NK cell, B cell, or stem cell, the cell can be an autologous cell or an allogeneic cell. In some embodiments, the allogeneic cell can be a genetically engineered allogeneic cell. Allogeneic cells, such as allogeneic T cells, and methods for genetically engineering allogeneic cells, are known in the art. In some embodiments where the allogeneic cell is a T cell, the T cell has been genetically engineered such that at least one component of the TCR complex is functionally impaired and/or is at least partially deleted. In some embodiments, the T cell has been genetically engineered such that the expression of at least one component of the TCR complex has been reduced or eliminated. In some embodiments, the allogeneic cell can be modified such that it is missing all or part of the B2 microglobulin gene. In some embodiment, allogeneic cells can include any of the lymphoproliferative elements and/or CLEs disclosed herein. The use of lymphoproliferative elements and CLEs can reduce the required number of cells and can facilitate cell manufacturing of T cells, NK cells, B cells, or stem cells. In some embodiments, the allogeneic cell can be an immortalized cell. In any of the aspects or embodiments herein that include an allogeneic cell, steps that include collecting blood or contacting a cell with a replication incompetent recombinant retroviral particle can be eliminated. For example, for treating a subject with an allogeneic CAR-T cell, a T cell may have been previously genetically modified, and the genetically modified allogeneic CAR-T cell is administered to the subject without collecting blood from the subject. In some embodiments, the allogeneic cell is administered subcutaneously. In some embodiments, the allogeneic cell is administered intravenously. In some embodiments, the allogeneic cell is administered intraperitoneally.

[0355] In some embodiments of any of the methods provided herein for modifying lymphocytes (e.g., T cells and/or NK cells), and aspects directed to use of replication incompetent recombinant retroviral particles (RIPs) in the manufacture of a kit for modifying T cells and/or NK cells of a subject, the modified, genetically modified, and/or transduced lymphocyte (e.g., T cell and/or NK cell) or population thereof, or the RIPs in compositions provided herein without cells, such as GMP RIP compositions, are introduced or reintroduced into the subject. Introduction or reintroduction of the modified and in illustrative embodiments genetically modified lymphocytes into a subject can be via any route known in the art. For example, introduction or reintroduction can be delivery via infusion into a blood vessel of the subject. Intratumor, intraperitoneal, intramuscular, and in certain illustrative embodiments, subcutaneous. In some embodiments, the modified, genetically modified, and/or transduced lymphocyte (e.g., T cell and/or NK cell) or population thereof, undergo 4 or fewer cell divisions ex vivo prior to being introduced or reintroduced into the subject. In some embodiments, the lymphocyte(s) used in such a method are resting T cells and/or resting NK cells that are in contact with the replication incompetent recombinant retroviral particles for between 1 hour and 12 hours. In some embodiments, no more than 12 hours, 10 hours, 8 hours, 6 hours, 4 hours, 2 hours, or 1 hour pass(es) between the time blood is collected from the subject and the time the modified and/or genetically modified T cells and/or NK cells are formulated for delivery and/or are reintroduced into the subject. In some embodiments, all steps after the blood are collected and before the blood is reintroduced, are performed in a closed system in which a person monitors the closed system throughout the processing.

[0356] In some embodiments of the methods and compositions disclosed herein, the modified and in illustrative embodiments genetically modified T cells and/or NK cells are introduced back, reintroduced, reinfused or otherwise delivered into the subject without additional ex vivo manipulation, such as stimulation and/or activation of T cells and/or NKs. In the prior art methods, ex vivo manipulation is used for stimulation/activation of T cells and/or NK cells and for expansion of genetically modified T cells and/or NK cells prior to introducing the genetically modified T cells and/or NK cells into the subject. In prior art methods, this generally takes days or weeks and requires a subject to return to a clinic for a blood infusion days or weeks after an initial blood draw. In some embodiments of the methods and compositions disclosed herein, T cells and/or NK cells are not stimulated ex vivo by exposure to anti-CD3 alone or anti-CD3 in combination with co-stimulation by, for example, anti-CD28, either in solution or attached to a solid support such as, for example, beads coated with anti-CD3/anti-CD28, prior to contacting the T cells and/or NK cells with the replication incompetent recombinant retroviral particles. As such provided herein is an ex vivo propagation-free method. In other embodiments, modified and in illustrative embodiments genetically modified T cells and/or NK cells are not expanded ex vivo, or only expanded for a small number of cell divisions (e.g., 1, 2, 3, 4, or 5 rounds of cell division), but are rather expanded, or predominantly expanded, in vivo, i.e., within the subject. In some embodiments, no additional media is added to allow for further expansion of the cells. In some embodiments, no cell manufacturing of the primary blood lymphocytes (PBLs) occurs while the PBLs are contacted with the replication incompetent recombinant retroviral particles. In illustrative embodiments, no cell manufacturing of the PBLs occurs while the PBLs are ex vivo. In traditional methods of adoptive cell therapy, subjects are lymphodepleted prior to reinfusion with genetically modified T cells and or NK cells. In some embodiments, patients or subjects are not lymphodepleted prior to infusion or reinfusion with modified and/or genetically modified T cells and or NK cells. However, embodiments of the methods and compositions disclosed herein can be used on pre-activated or pre-stimulated T cells and/or NK cells as well. In some embodiments, T cells and/or NK cells can be stimulated ex vivo by exposure to anti-CD3 with or without anti-CD28 solid supports prior to contacting the T cells and/or NK cells with the replication incompetent recombinant retroviral particles. In some embodiments, the T cells and/or NK cells can be exposed to anti-CD3/anti-CD28 solid supports for less than 1, 2, 3, 4, 6, 8, 10, 12, 14, 16, 18, or 24 hours, including no exposure, before the T cells and/or NK cells are contacted the replication incompetent recombinant retroviral particles. In illustrative embodiments, the T cells and/or NK cells can be exposed to anti-CD3/anti-CD28 solid supports for less than 1, 2, 3, 4, 6, or 8 hours before the T cells and/or NK cells are contacted the replication incompetent recombinant retroviral particles.

### Enrichment of T and/or NK Cells by Positive Selection

[0357] In some embodiments, any cell in a cell mixture, cell formulation, or reaction mixture that is useful in adoptive cell therapy, referred to herein as desired cells, such as one or more cell populations of T and/or NK cells, can be enriched prior to formulation for delivery. In some embodiments, the desired cells can be enriched by positive selection prior to being contacted with a recombinant nucleic acid vector, such as a replication incompetent retroviral particle. In other embodiments, the desired cells can be enriched by positive selection after the cell mixture, cell formulation, or reaction mixture is contacted with a recombinant nucleic acid vector, such as a replication incompetent retroviral particle. In some embodiments, enriching the one or more cell populations can be performed at the same time as any of the methods of genetic modification disclosed herein, and in illustrative embodiments genetic modification with a replication incompetent retroviral particle.

[0358] Mononuclear cells (such as PBMCs) or TNCs can be isolated from a more complex cell mixture such as whole blood by density-gradient centrifugation or reverse perfusion of a leukoreduction filter assembly, respectively, as described in more detail herein. In some embodiments, the desired cells can have specific cell lineages, such as NK cells, T cells, and/or T cell subsets including naïve, effector, memory, suppressor T-cells, and/or regulatory T cells and can be enriched through the selection of cells expressing one or more surface molecules. In illustrative embodiments, the one or more surface molecules can include CD4, CD8, CD16, CD25, CD27, CD28, CD44, CD45RA, CD45RO, CD56, CD62L, CCR7, KIRs, FoxP3, and/or TCR components such as CD3. Methods using beads conjugated to antibodies directed to one or more surface molecules can be used to enrich for the desired cells using magnetic, density, and size-based separation.

### Engineered Signaling Polypeptide(s)

[0359] In some embodiments, the replication incompetent recombinant retroviral particles used to contact T cells and/or NK cells have a polynucleotide or nucleic acid having one or more transcriptional units that encode one or more engineered signaling polypeptides. In some embodiments, an engineered signaling polypeptide includes any combination of an extracellular domain (e.g., an antigen-specific targeting region or ASTR), a stalk and a transmembrane domain, combined with one or more intracellular activating domains, optionally one or more modulatory domains (such as a co-stimulatory domain), and optionally one or more T cell survival motifs. In illustrative embodiments, at least one, two, or all of the engineered signaling polypeptides is a chimeric antigen receptor (CAR) or a lymphoproliferative element (LE) such as a chimeric lymphoproliferative element (CLE). In some embodiments, at least one, two, or all of the engineered signaling polypeptides is an engineered T cell receptor (TCR). In some embodiments, when two signaling polypeptides are utilized, one encodes a lymphoproliferative element and the other encodes a chimeric antigen receptor (CAR) that includes an antigen-specific targeting region (ASTR), a transmembrane domain, and an intracellular activating domain. For any domain of an engineered signaling polypeptide disclosed herein, exemplary sequences can be found in WO2019/055946, incorporated herein in its entirety by reference. A skilled artisan will recognize that such engineered polypeptides can also be referred to as recombinant polypeptides. The engineered signaling polypeptides, such as CARs, engineered TCRs, LEs, and CLEs provided herein, are typically transgenes with respect to lymphocytes, especially T cells and NK cells, and most especially T cells and/or NK cells that are engineered using methods and compositions provided herein, to express such signaling polypeptides.

### Extracellular Domain

[0360] In some embodiments, an engineered signaling polypeptide includes an extracellular domain that is a member of a specific binding pair. For example, in some embodiments, the extracellular domain can be the extracellular domain of a cytokine receptor, or a mutant thereof, or a hormone receptor, or a mutant thereof. Such mutant extracellular domains in some embodiments have been reported to be constitutively active when expressed at least in some cell types. In illustrative embodiments, such extracellular and transmembrane domains do not include a ligand binding region. It is believed that such domains do not bind a ligand when present in an engineered signaling polypeptide and expressed in B cells, T cells, and/or NK cells. Mutations in such receptor mutants can occur in the extracellular juxtamembrane region. Not to be limited by theory, a mutation in at least some extracellular domains (and some extracellular-transmembrane domains) of engineered signaling polypeptides provided herein, are responsible for signaling of the engineered signaling polypeptide in the absence of ligand, by bringing activating chains together that are not normally together. Further embodiments regarding extracellular domains that comprise mutations in extracellular domains can be found, for example, in the Lymphoproliferative Element section herein.

[0361] In certain illustrative embodiments, the extracellular domain comprises a dimerizing motif. In an illustrative embodiment the dimerizing motif comprises a leucine zipper. In some embodiments, the leucine zipper is from a jun polypeptide, for example c-jun. Further embodiments regarding extracellular domains that comprise a dimerizing motif can be found, for example, in the Lymphoproliferative Element section herein.

[0362] In certain embodiments, the extracellular domain is an antigen-specific targeting region (ASTR), sometimes called an antigen binding domain herein. Specific binding pairs include, but are not limited to, antigen-antibody binding pairs; ligand-receptor binding pairs; and the like. Thus, a member of a specific binding pair suitable for use in an engineered signaling polypeptide of the present disclosure includes an ASTR that is an antibody, an antigen, a ligand, a receptor binding domain of a ligand, a receptor, a ligand binding domain of a receptor, and an alternative non-antibody scaffold, also referred to herein as an antibody mimetic. In any of the aspects or embodiments provided herein that include an ASTR, the ASTR can be a suitable antibody mimetic. In some embodiments, the antibody mimetic can be an affibody, an afflilin, an affimer, an affitin, an alphabody, an alphamab, an anticalin, a peptide aptamer, an armadillo repeat protein, an atrimer, an avimer (also known as avidity multimer), a C-type lectin domain, a cysteine-knot miniprotein, a cyclic peptide, a cytotoxic T-lymphocyte associated protein-4, a DARPin (Designed Ankyrin Repeat Protein), a fibrinogen domain, a fibronectin binding domain (FN3 domain) (e.g., adnectin or monobody), a fynomer, a knottin, a Kunitz domain peptide, a nanofitin, a leucine-rich repeat domain, a lipocalin domain, a mAb 2 or Fcab™, a nanobody, a nanoCLAMP, an OBody, a Pronectin, a single-chain TCR, a tetratricopeptide repeat domain, VHH, or a V-like domain. In any of the aspects or embodiments provided herein that include an ASTR that is an antibody, for example, an scFv, a suitable antibody mimetic can be used instead of the antibody.

[0363] An ASTR suitable for use in an engineered signaling polypeptide of the present disclosure can be any antigen-binding polypeptide. In certain embodiments, the ASTR is an antibody such as a full-length antibody, a single-chain antibody, a Fab fragment, a Fab′ fragment, a (Fab′)2 fragment, a Fv fragment, and a divalent single-chain antibody or a diabody.

[0364] In some embodiments, the ASTR is a single chain Fv (scFv). In some embodiments, the heavy chain is positioned N-terminal of the light chain in the engineered signaling polypeptide. In other embodiments, the light chain is positioned N-terminal of the heavy chain in the engineered signaling polypeptide. In any of the disclosed embodiments, the heavy and light chains can be separated by a linker as discussed in more detail herein. In any of the disclosed embodiments, the heavy or light chain can be at the N-terminus of the engineered signaling polypeptide and is typically C-terminal of another domain, such as a signal sequence or peptide.

[0365] Other antibody-based recognition domains (cAb VHH (camelid antibody variable domains) and humanized versions, IgNAR VH (shark antibody variable domains) and humanized versions, sdAb VH (single domain antibody variable domains) and “camelized” antibody variable domains are suitable for use with the engineered signaling polypeptides and methods using the engineered signaling polypeptides of the present disclosure. In some instances, T cell receptor (TCR) based recognition domains.

[0366] Naturally-occurring T cell receptors include an α-subunit and a β-subunit, separately produced by unique recombination events in a T cell’s genome. Libraries of TCRs may be screened for their selectivity to a target antigen, for example, any of the antigens disclosed herein. Screens of natural and/or engineered TCRs can identify TCRs with high avidities and/or reactivities towards a target antigen. Such TCRs can be selected, cloned, and a polynucleotide encoding such a TCR can be included in a replication incompetent recombinant retroviral particle to genetically modify a lymphocyte, or in illustrative embodiments, T cell or NK cell, such that the lymphocyte expresses the engineered TCR. In some embodiments, the TCR can be a single chain TCR (scTv, single chain two-domain TCR containing VαVβ).

[0367] Certain embodiments for any aspect or embodiment herein that includes a CAR, include CARs having extracellular domains engineered to co-opt the endogenous TCR signaling complex and CD3Z signaling pathway. In one embodiment, a chimeric antigen receptor ASTR is fused to one of the endogenous TCR complex chains (e.g., TCR alpha, CD3E etc.) to promote incorporation into the TCR complex and signaling through the endogenous CD3Z chains. In other embodiments, a CAR contains a first scFv or protein that binds to the TCR complex and a second scFv or protein that binds to the target antigen (e.g., tumor antigen). In another embodiment, the TCR can be a single chain TCR (scTv, single chain two-domain TCR containing VαVβ). Finally, scFv’s may also be generated to recognize the specific MHC/peptide complex, thereby acting as a surrogate TCR. Such peptide/MHC scFv-binders may be used in many similar configurations as CARs.

[0368] In some embodiments, the ASTR can be multispecific, e.g., bispecific antibodies. Multispecific antibodies have binding specificities for at least two different sites. In certain embodiments, one of the binding specificities is for one target antigen and the other is for another target antigen. In certain embodiments, bispecific antibodies may bind to two different epitopes of a target antigen. Bispecific antibodies may also be used to localize cytotoxic agents to cells which express a target antigen. Bispecific antibodies can be prepared as full-length antibodies or antibody fragments. In some embodiments, any of the CARs of the current disclosure can be multispecific. In some embodiments, one of the ASTRs on a multispecific, e.g., bispecific, can be an anti-idiotype extracellular recognition domain as disclosed elsewhere herein.

[0369] An ASTR suitable for use in an engineered signaling polypeptide of the present disclosure, or an engineered TCR, can have a variety of antigen-binding specificities. In some cases, the antigen-binding domain is specific for an epitope present in an antigen that is expressed by (synthesized by) a target cell. In one example, the target cell is a cancer cell associated antigen. The cancer cell associated antigen can be an antigen associated with, e.g., a breast cancer cell, a B cell lymphoma cell, as a diffuse large B cell lymphoma (DLBCL) cell, a Hodgkin lymphoma cell, an ovarian cancer cell, a prostate cancer cell, a mesothelioma, a lung cancer cell (e.g., a small cell lung cancer cell), a lymphoma cell, a non-Hodgkin B-cell lymphoma (B-NHL) cell, an ovarian cancer cell, a prostate cancer cell, a mesothelioma cell, a lung cancer cell (e.g., a small cell lung cancer cell), a melanoma cell, a leukemia cell, a chronic myelogenous leukemia (CML) cell, a chronic lymphocytic leukemia (CLL) cell, an acute myelogenous leukemia (AML) cell, an acute lymphocytic leukemia (ALL) cell, a neuroblastoma cell, a glioma, a glioblastoma, a medulloblastoma, a colorectal cancer cell, etc. A cancer cell associated antigen may also be expressed by a non-cancerous cell. In some embodiments, the cancer cell is a PDL-1 positive cancer cell. In illustrative embodiments, the cancer cell is a PDL-1 positive DLBCL cell. In some embodiments, the cancer cell is a PDL-1 negative cell. In illustrative embodiments, the cancer cell is a PDL-1 negative DLBCL cell.

[0370] In any of the aspects or embodiments herein that include an ASTR or a recombinant TCR, the antigen can be a tumor-associated antigen or a tumor-specific antigen. In some embodiments, the tumor-associated antigen or tumor-specific antigen is Axl, ROR1, ROR2, Her2 (ERBB2), prostate stem cell antigen (PSCA), PSMA (prostate-specific membrane antigen), B cell maturation antigen (BCMA), alpha-fetoprotein (AFP), carcinoembryonic antigen (CEA), cancer antigen-125 (CA-125), CA19-9, calretinin, chromogranin, protein melan-A (melanoma antigen recognized by T lymphocytes; MART-1), myo-D1, muscle-specific actin (MSA), neurofilament, neuron-specific enolase (NSE), MUC-1, epithelial membrane protein (EMA), epithelial tumor antigen (ETA), tyrosinase, melanoma-associated antigen (MAGE), MAGE-Al, high molecular weight-melanoma associated antigen (HMW-MAA), placental alkaline phosphatase, synaptophysin, thyroglobulin, thyroid transcription factor-1, the dimeric form of the pyruvate kinase isoenzyme type M2 (tumor M2-PK), CD19, CD20, CD22, CD23, CD24, CD27, CD30, CD33, CD34, CD37, CD38, CD40, CD44, CD44v6, CD44v⅞, CD45, CD70, CD99, CD117, CD123, CD138, CD171, GD2 (ganglioside G2), EphA2, CSPG4, FAP (Fibroblast Activation Protein), kappa, lambda, 5T4, αvβ6 integrin, integrin αvβ3 (CD61), galactin, K-Ras (V-Ki-ras2 Kirsten rat sarcoma viral oncogene), Ral-B, B7-H3, B7-H6, CAIX, EGFR, EGP2, EGP40, EpCAM, fetal AchR, FRα, GD3, HLA-A1+MAGE1, HLA-A1+NY-ESO-1, HLA-DR, IL-11Ra, IL-13Ra2, Lewis-Y, Muc16, NCAM, NKG2D Ligands, PRAME, Survivin, TAG72, TEMs, VEGFR2, EGFRvIII (epidermal growth factor variant III), sperm protein 17 (Sp17), mesothelin, PAP (prostatic acid phosphatase), prostein, TARP (T cell receptor gamma alternate reading frame protein), Trp-p8, STEAP1 (six-transmembrane epithelial antigen of the prostate 1), an abnormal ras protein, an abnormal p53 protein, New York esophageal squamous cell carcinoma antigen (NYESO1), PDL-1 and the like.

[0371] In any of the aspects or embodiments herein that include an ASTR or a recombinant TCR, the ASTR or recombinant TCR can recognize, bind to, or otherwise interact with the idiotype of a target antibody or antibody mimetic, as disclosed elsewhere herein. In such embodiments, the anti-idiotype polypeptide is a CAR or TCR wherein the ASTR is the anti-idiotype external recognition domain of an anti-idiotype polypeptide. In some embodiments, the ASTR can be any of the extracellular recognition domains of an anti-idiotype polypeptide disclosed herein. For example, the ASTR can recognize the idiotcetuximab, muromonab-CD3, efalizumab, tositumomab-i131, nebacumab, edrecolomab, catumaxomab, daclizumab, olaratumab, abciximab, rituximab, basiliximab, palivizumab, infliximab, trastuzumab, adalimumab, ibritumomab tiuxetan, omalizumab, bevacizumab, natalizumab, panitumumab, ranibizumab, eculizumab, certolizumab pegol, ustekinumab, canakinumab, golimumab, ofatumumab, tocilizumab, denosumab, belimumab, ipilimumab, brentuximab vedotin, pertuzumab, ado-trastuzumab emtansine, raxibacumab, obinutuzumab, siltuximab, ramucirumab, vedolizumab, nivolumab, pembrolizumab, blinatumomab, alemtuzumab, evolocumab, idarucizumab, necitumumab, dinutuximab, secukinumab, mepolizumab, alirocumab, daratumumab, elotuzumab, ixekizumab, reslizumab, bezlotoxumab, atezolizumab, obiltoxaximab, brodalumab, dupilumab, inotuzumab ozogamicin, guselkumab, sarilumab, avelumab, emicizumab, ocrelizumab, benralizumab, durvalumab, gemtuzumab ozogamicin, erenumab (erenumab-aooe), galcanezumab (galcanezumab-gnlm), burosumab (burosumab-twza), lanadelumab (lanadelumab-flyo), mogamulizumab (mogamulizumab-kpkc), tildrakizumab (tildrakizumab-asmn), fremanezumab (fremanezumab-vfrm), ravulizumab (ravulizumab-cwvz), cemiplimab (cemiplimab-rwlc), ibalizumab (ibalizumab-uiyk) emapalumab (emapalumab-lzsg), moxetumomab pasudotox (moxetumomab pasudotox-tdfk), caplacizumab (caplacizumab-yhdp), risankizumab (risankizumab-rzaa), polatuzumab vedotin (polatuzumab vedotin-piiq), romosozumab (romosozumab-aqqg), brolucizumab (brolucizumab-dbll), crizanlizumab (crizanlizumab-tmca), enfortumab vedotin (enfortumab vedotin-ejfv), [fam-]trastuzumab deruxtecan (fam-trastuzumab deruxtecan-nxki), teprotumumab (teprotumumab-trbw), eptinezumab (eptinezumab-jjmr), isatuximab (isatuximab-irfc), sacituzumab govitecan (sacituzumab govitecan-hziy), inebilizumab (inebilizumab-cdon), tafasitamab (tafasitamab-cxix), belantamab mafodotin (belantamab mafodotin-blmf), satralizumab (satralizumab-mwge), atoltivimab, maftivimab, odesivimab-ebgn, naxitamab-gqgk, margetuximab-cmkb, ansuvimab-zykl, evinacumab, dostarlimab (dostarlimab-gxly), loncastuximab tesirine (loncastuximab tesirine-lpyl), amivantamab (amivantamab-vmjw), aducanumab (aducanumab-avwa), tralokinumab, anifrolumab (anifrolumab-fnia), oportuzumab monatox, tisotumab vedotin, bimekizumab, narsoplimab, tezepelumab, sintilimab, inolimomb, balstilimab, ublituximab, toripalimab, omburtamab, penpulimab, tanezumab, faricimab, sutimlimab, teplizumab, and retifanlimab.

[0372] In some embodiments, a member of a specific binding pair suitable for use in an engineered signaling polypeptide is an ASTR that is a ligand for a receptor. Ligands include, but are not limited to, hormones (e.g., erythropoietin, growth hormone, leptin, etc.); cytokines (e.g., interferons, interleukins, certain hormones, etc.); growth factors (e.g., heregulin; vascular endothelial growth factor (VEGF); and the like); an integrin-binding peptide (e.g., a peptide comprising the sequence Arg-Gly-Asp (SEQ ID NO:1)); and the like.

[0373] Where the member of a specific binding pair in an engineered signaling polypeptide is a ligand, the engineered signaling polypeptide can be activated in the presence of a second member of the specific binding pair, where the second member of the specific binding pair is a receptor for the ligand. For example, where the ligand is VEGF, the second member of the specific binding pair can be a VEGF receptor, including a soluble VEGF receptor.

[0374] As noted above, in some cases, the member of a specific binding pair that is included in an engineered signaling polypeptide is an ASTR that is a receptor, e.g., a receptor for a ligand, a co-receptor, etc. The receptor can be a ligand-binding fragment of a receptor. Suitable receptors include, but are not limited to, a growth factor receptor (e.g., a VEGF receptor); a killer cell lectin-like receptor subfamily K, member 1 (NKG2D) polypeptide (receptor for MICA, MICB, and ULB6); a cytokine receptor (e.g., an IL-13 receptor; an IL-2 receptor; etc.); CD27; a natural cytotoxicity receptor (NCR) (e.g., NKP30 (NCR3/CD337) polypeptide (receptor for HLA-B-associated transcript 3 (BAT3) and B7-H6); etc.); etc.

[0375] In certain embodiments of any of the aspects provided herein that include an ASTR, the ASTR can be directed to an intermediate protein that links the ASTR with a target molecule expressed on a target cell. The intermediate protein may be endogenously expressed or introduced exogenously and may be natural, engineered, or chemically modified. In certain embodiments the ASTR can be an anti-tag ASTR such that at least one tagged intermediate, typically an antibody-tag conjugate, is included between a tag recognized by the ASTR and a target molecule, typically a protein target, expressed on a target cell. Accordingly, in such embodiments, the ASTR binds a tag and the tag is conjugated to an antibody directed against an antigen on a target cell, such as a cancer cell. Non-limiting examples of tags include fluorescein isothiocyanate (FITC), streptavidin, biotin, histidine, dinitrophenol, peridinin chlorophyll protein complex, green fluorescent protein, phycoerythrin (PE), horse radish peroxidase, palmitoylation, nitrosylation, alkaline phosphatase, glucose oxidase, and maltose binding protein. As such, the ASTR comprises a molecule that binds the tag.

### Stalk

[0376] In some embodiments, the engineered signaling polypeptide includes a stalk which is located in the portion of the engineered signaling polypeptide lying outside the cell and interposed between the ASTR and the transmembrane domain. In some embodiments, the stalk has at least 85, 90, 95, 96, 97, 98, 99, or 100% identity to a wild-type CD8 stalk region (TTTPAPRPPTPAPTIASQPLSLRPEACRPAAGG AVHTRGLDFA (SEQ ID NO:2), has at least 85, 90, 95, 96, 97, 98, 99, or 100% identity to a wild-type CD28 stalk region (FCKIEVMYPPPYLDNEKSNGTIIHVKGKHLCPSPLFPGPSKP (SEQ ID NO:3)), or has at least 85, 90, 95, 96, 97, 98, 99, or 100% identity to a wild-type immunoglobulin heavy chain stalk region. In an engineered signaling polypeptide, the stalk employed allows the antigen-specific targeting region, and typically the entire engineered signaling polypeptide, to retain increased binding to a target antigen.

[0377] The stalk region can have a length of from 4 to 250 amino acids, 10 to 250 amino acids, 4 to 200 amino acids, 4 to 100 amino acids, or 4 to 75 amino acids. In some embodiments, the stalk can have a length of from e.g., from 4 aa to 10 aa, from about 10 aa to about 15 aa, from about 15 aa to about 20 aa, from about 20 aa to about 25 aa, from about 25 aa to about 30 aa, from about 30 aa to about 40 aa, or from about 40 aa to about 50 aa. In some embodiments, the stalk separates the anti-id ERD from a cell membrane to which it is attached, at a great enough distance to permit binding of the anti-id ERD to its target antibody when they come into contact. In certain embodiments, the stalk is a means for effectively separating an anti-id ERD from a cell membrane to which it is attached to permit binding of the anti-id ERD to its target antibody when they come into contact with each other.

[0378] In some embodiments, the stalk of an engineered signaling polypeptide includes at least one cysteine. For example, In some embodiments, the stalk can include the sequence Cys-Pro-Pro-Cys (SEQ ID NO:4). If present, a cysteine in the stalk of a first engineered signaling polypeptide can be available to form a disulfide bond with a stalk in a second engineered signaling polypeptide.

[0379] Stalks can include immunoglobulin hinge region amino acid sequences that are known in the art; see, e.g., Tan et al. (1990) Proc. Natl. Acad. Sci. USA 87:162; and Huck et al. (1986) Nucl. Acids Res. 14:1779. As non-limiting examples, an immunoglobulin hinge region can include a domain with at least 50, 60, 70, 75, 80, 85, 90, 95, 96, 97, 98, 99 or 100% sequence identity to a stretch of at least 10, 15, 20, or all of the amino acids of any of the following amino acid sequences: DKTHT (SEQ ID NO:5); CPPC (SEQ ID NO:4); CPEPKSCDTPPPCPR (SEQ ID NO:6) (see, e.g., Glaser et al. (2005) J. Biol. Chem. 280:41494); ELKTPLGDTTHT (SEQ ID NO:7); KSCDKTHTCP (SEQ ID NO:8); KCCVDCP (SEQ ID NO:9); KYGPPCP (SEQ ID NO: 10); EPKSCDKTHTCPPCP (SEQ ID NO:11) (human IgGl hinge); ERKCCVECPPCP (SEQ ID NO:12) (human IgG2 hinge); ELKTPLGDTTHTCPRCP (SEQ ID NO: 13) (human IgG3 hinge); SPNMVPHAHHAQ (SEQ ID NO:14) (human IgG4 hinge); and the like. The stalk can include a hinge region with an amino acid sequence of a human IgG1, IgG2, IgG3, or IgG4, hinge region. The stalk can include one or more amino acid substitutions and/or insertions and/or deletions compared to a wild-type (naturally-occurring) hinge region. For example, His229 of human IgG 1 hinge can be substituted with Tyr, so that the stalk includes the sequence EPKSCDKTYTCPPCP (SEQ ID NO:15), (see, e.g., Yan et al. (2012) J. Biol. Chem. 287:5891). The stalk can include an amino acid sequence derived from human CD8; e.g., the stalk can include the amino acid sequence: TTTPAPRPPTPAPTIASQPLSLRPEACRPAAGGAVHTRGLDFACD (SEQ ID NO:16), or a variant thereof.

### Transmembrane Domain

[0380] An engineered signaling polypeptide of the present disclosure can include transmembrane domains for insertion into a eukaryotic cell membrane. The transmembrane domain can be interposed between the ASTR and the co-stimulatory domain. The transmembrane domain can be interposed between the stalk and the co-stimulatory domain, such that the chimeric antigen receptor includes, in order from the amino terminus (N-terminus) to the carboxyl terminus (C-terminus): an ASTR; a stalk; a transmembrane domain; and an activating domain.

[0381] Any transmembrane (TM) domain that provides for insertion of a polypeptide into the cell membrane of a eukaryotic (e.g., mammalian) cell is suitable for use in aspects and embodiments disclosed herein. In some embodiments, the TM domain for any aspect provided herein that includes a CAR can include a transmembrane domain from BAFFR, C3Z, CEACAM1, CD2, CD3A, CD3B, CD3D, CD3E, CD3G, CD3Z, CD4, CD5, CD7, CD8A, CD8B, CD9, CD11A, CD11B, CD11C, CD11D, CD27, CD16, CD18, CD19, CD22, CD28, CD29, CD33, CD37, CD40, CD45, CD49A, CD49D, CD49F, CD64, CD79A, CD79B, CD80, CD84, CD86, CD96 (Tactile), CD100 (SEMA4D), CD103, C134, CD137, CD154, CD160 (BY55), CD162 (SELPLG), CD226 (DNAM1), CD229 (Ly9), CD247, CRLF2, CRTAM, CSF2RA, CSF2RB, CSF3R, EPOR, FCER1G, FCGR2C, FCGRA2, GHR, HVEM (LIGHTR), IA4, ICOS, IFNAR1, IFNAR2, IFNGR1, IFNGR2, IFNLR1, IL1R1, IL1RAP, IL1RL1, IL1RL2, IL2RA, IL2RB, IL2RG, IL3RA, IL4R, IL5RA, IL6R, IL6ST, IL7RA, IL7RA Ins PPCL, IL9R, IL10RA, IL10RB, IL11RA, IL12RB1, IL12RB2, IL13RA1, IL13RA2, IL15RA, IL17RA, IL17RB, IL17RC, IL17RD, IL17RE, IL18R1, IL18RAP, IL20RA, IL20RB, IL21R, IL22RA1, IL23R, IL27RA, IL31RA, ITGA1, ITGA4, ITGA6, ITGAD, ITGAE, ITGAL, ITGAM, ITGAX, ITGB1, ITGB2, ITGB7, KIRDS2, LEPR, LFA-1 (CD11a, CD18), LIFR, LTBR, MPL, NKp80 (KLRF1), OSMR, PAG/Cbp, PRLR, PSGL1, SLAM (SLAMF1, CD150, IPO-3), SLAMF4 (CD244, 2B4), SLAMF6 (NTB-A, Ly108), SLAMF7, SLAMF8 (BLAME), TNFR2, TNFRSF4, TNFRSF8, TNFRSF9, TNFRSF14, TNFRSF18, VLA1, or VLA-6, or functional mutants and/or fragments thereof.

[0382] Non-limiting examples of TM domains suitable for any of the aspects or embodiments provided herein, include a domain with at least 50, 60, 70, 75, 80, 85, 90, 95, 96, 97, 98, 99 or 100% sequence identity to a stretch of at least 10, 15, 20, or all of the amino acids of any of the following TM domains or combined stalk and TM domains: a) CD8 alpha TM (SEQ ID NO:17); b) CD8 beta TM (SEQ ID NO:18);c) CD4 stalk (SEQ ID NO:19); d) CD3Z TM (SEQ ID NO:20); e) CD28 TM (SEQ ID NO:21); f) CD134 (OX40) TM: (SEQ ID NO:22); g) CD7 TM (SEQ ID NO:23); h) CD8 stalk and TM (SEQ ID NO:24); and i) CD28 stalk and TM (SEQ ID NO:25).

[0383] As non-limiting examples, a transmembrane domain of an aspect of the invention can have at least 80%, 90%, or 95% or can have 100% sequence identity to the SEQ ID NO:17 transmembrane domain, or can have 100% sequence identity to any of the transmembrane domains from the following genes respectively: the CD8 beta transmembrane domain, the CD4 transmembrane domain, the CD3 zeta transmembrane domain, the CD28 transmembrane domain, the CD134 transmembrane domain, or the CD7 transmembrane domain.

### Intracellular Activating Domain

[0384] Intracellular activating domains suitable for use in an engineered signaling polypeptide of the present disclosure when activated, typically induce the production of one or more cytokines; increase cell death; and/or increase proliferation of CD8⁺ T cells, CD4⁺ T cells, NKT cells, γδ T cells, and/or neutrophils. Activating domains can also be referred to as activation domains herein. Activating domains can be used in CARs or in lymphoproliferative elements provided herein.

[0385] In some embodiments, the intracellular activating domain includes at least one (e.g., one, two, three, four, five, six, etc.) ITAM motifs as described below. In some embodiments, an intracellular activating domain of an aspect of the invention can have at least 80%, 90%, or 95% or can have 100% sequence identity to the CD3Z, CD3D, CD3E, CD3G, CD79A, CD79B, DAP12, FCER1G, FCGR2A, FCGR2C, DAP10/CD28, ZAP70, NKp30 (B7-H6), NKG2D, NKp44, NKp46, FcR gamma (FCER1G), FcR beta (FCER1B), FcgammaRI, FcgammaRIIA, FcgammaRIIC, FcgammaRIIIA, and FcRL5 domains as described below.

[0386] Intracellular activating domains suitable for use in an engineered signaling polypeptide of the present disclosure include immunoreceptor tyrosine-based activation motif (ITAM)-containing intracellular signaling polypeptides. An ITAM motif is YX₁X₂L/I, where X₁ and X₂ are independently any amino acid. In some embodiments, the intracellular activating domain of an engineered signaling polypeptide includes 1, 2, 3, 4, or 5 ITAM motifs. In some embodiments, an ITAM motif is repeated twice in an intracellular activating domain, where the first and second instances of the ITAM motif are separated from one another by 6 to 8 amino acids, e.g., (YX₁X₂L/I)(X₃)ₙ(YX₁X₂L/I), where n is an integer from 6 to 8, and each of the 6-8 X₃ can be any amino acid. In some embodiments, the intracellular activating domain of an engineered signaling polypeptide includes 3 ITAM motifs.

[0387] A suitable intracellular activating domain can be an ITAM motif-containing portion that is derived from a polypeptide that contains an ITAM motif. For example, a suitable intracellular activating domain can be an ITAM motif-containing domain from any ITAM motif-containing protein. Thus, a suitable intracellular activating domain need not contain the entire sequence of the entire protein from which it is derived. Examples of suitable ITAM motif-containing polypeptides include, but are not limited to: CD3Z (CD3 zeta); CD3D (CD3 delta); CD3E (CD3 epsilon); CD3G (CD3 gamma); CD79A (antigen receptor complex-associated protein alpha chain); CD79B (antigen receptor complex-associated protein beta chain) DAP12; and FCERIG (Fc epsilon receptor I gamma chain). In some embodiments, an intracellular activating domain can include a domain with at least 50%, 60%, 70%, 75%, 80%, 85%, 90%, 95%, 96%, 97%, 98%, 99% or 100% sequence identity to a stretch of at least 10, 15, 20, or all the amino acids in the following ITAM motif-containing polypeptides or to a contiguous stretch of from about 100 amino acids to about 110 amino acids (aa), from about 110 aa to about 115 aa, from about 115 aa to about 120 aa, from about 120 aa to about 130 aa, from about 130 aa to about 140 aa, from about 140 aa to about 150 aa, or from about 150 aa to about 160 aa, of any of the following ITAM motif-containing polypeptides: CD3 zeta chain (also known as CD3Z, T cell receptor T3 zeta chain, CD247, CD3-ZETA, CD3H, CD3Q, T3Z, TCRZ, etc.) with exemplary sequences

MKWKALFTAAILQAQLPITEAQSFGLLDPKLCYLLDGILFIYGVILTALF
LRVKFSRSADAPAYQQGQNQL[YNELNLGRREEYDVL]DKRRGRDPEMGG
KPRRKNPQEGL[YNELQKDKMAEAYSEI]GMKGERRRGKGHDGL[YQGLS
TATKDTYDAL]HMQALPPR (SEQ ID NO:26),

MKWKALFTAAILQAQLPITEAQSFGLLDPKLCYLLDGILFIYGVILTALF
LRVKFSRSADAPAYQQGQNQL[YNELNLGRREEYDVL]DKRRGRDPEMGG
KPQRRKNPQEGL[YNELQKDKMAEAYSEI]GMKGERRRGKGHDGL[YQGL
STATKDTYDAL]HMQALPPR (SEQ ID NO:27),;

RVKFSRSADAPAYQQGQNQL[YNELNLGRREEYDVL]DKRRGRDPEMGGK
PRRKNPQEGL[YNELQKDKMAEAYSEI]GMKGERRRGKGHDGL[YQGLST
ATKDTYDAL]HMQALPPR (SEQ IDNO:28),

RVKFSRSADAPAYQQGQNQL[YNELNLGRREEYDVL]DKRRGRDPEMGGK
PQRRKNPQEGL[YNELQKDKMAEAYSEI]GMKGERRRGKGHDGL[YQGLS
TATKDTYDAL]HMQALPPR (SEQ IDNO:29),

NQL[YNELNLGRREEYDVL]DKR SEQ ID NO:30); EGL[YNELQKD
KMAEAYSEI]GMK(SEQ ID NO:31),

and

DGL[YQGLSTATKDTYDAL]HMQ (SEQ ID NO:32);

T cell surface glycoprotein CD3 delta chain (also known as CD3D; CD3-DELTA; T3D; CD3 antigen, delta subunit; CD3 delta; CD3d antigen, delta polypeptide (TiT3 complex); OKT3, delta chain; T cell receptor T3 delta chain; T cell surface glycoprotein CD3 delta chain; etc.) with exemplary sequences:

MEHSTFLSGLVLATLLSQVSPFKIPIEELEDRVFVNCNTSITWVEGTVGT
LLSDITRLDLGKRILDPRGIYRCNGTDIYKDKESTVQVHYRMCQSCVELD
PATVAGIIVTDVIATLLLALGVFCFAGHETGRLSGAADTQALLRNDQV[Y
QPLRDRDDAQYSHL]GGNWARNK (SEQ ID NO:33),

MEHSTFLSGLVLATLLSQVSPFKIPIEELEDRVFVNCNTSITWVEGTVGT
LLSDITRLDLGKRILDPRGIYRCNGTDIYKDKESTVQVHYRTADTQALLR
NDQV[YQPLRDRDDAQYSHL]GGNWARNK(SEQ ID NO:34),

and

DQV[YQPLRDRDDAQYSHL]GGN (SEQ ID NO:35);

T cell surface glycoprotein CD3 epsilon chain (also known as CD3e, T cell surface antigen T3/Leu-4 epsilon chain, T cell surface glycoprotein CD3 epsilon chain, AI504783, CD3, CD3epsilon, T3e, etc.) with exemplary sequences:

MQSGTHWRVLGLCLLSVGVWGQDGNEEMGGITQTPYKVSISGTTVILTCP
QYPGSEILWQHNDKNIGGDEDDKNIGSDEDHLSLKEFSELEQSGYYVCYP
RGSKPEDANFYLYLRARVCENCMEMDMSVATIVIVDICITGGLLLLVYYW
SKNRKAKAKPVTRGAGAGGRQRGQNKERPPPVPNPD[YEPIRKGQRDLYS
GL]NQRRI (SEQ ID NO:36)

and

NPD[YEPIRKGQRDLYSGL]NQR (SEQ ID NO:37);

T cell surface glycoprotein CD3 gamma chain (also known as CD3G, T cell receptor T3 gamma chain, CD3-GAMMA, T3G, gamma polypeptide (TiT3 complex), etc.) with exemplary sequences:

MEQGKGLAVLILAIILLQGTLAQSIKGNHLVKVYDYQEDGSVLLTCDAEA
KNITWFKDGKMIGFLTEDKKKWNLGSNAKDPRGMYQCKGSQNKSKPLQVY
YRMCQNCIELNAATISGFLFAEIVSIFVLAVGVYFIAGQDGVRQSRASDK
QTLLPNDQL[YQPLKDREDDQYSHL]QGNQLRRN (SEQ IDNO:38) a
nd DQL[YQPLKDREDDQYSHL]QGN (SEQ ID NO:39);

CD79A (also known as B-cell antigen receptor complex-associated protein alpha chain; CD79a antigen (immunoglobulin-associated alpha); MB-1 membrane glycoprotein; Ig-alpha; membrane-bound immunoglobulin-associated protein; surface IgM-associated protein; etc.) with exemplary sequences:

MPGGPGVLQALPATIFLLFLLSAVYLGPGCQALWMHKVPASLMVSLGEDA
HFQCPHNSSNNANVTWWRVLHGNYTWPPEFLGPGEDPNGTLIIQNVNKSH
GGIYVCRVQEGNESYQQSCGTYLRVRQPPPRPFLDMGEGTKNRIITAEGI
ILLFCAVVPGTLLLFRKRWQNEKLGLDAGDEYEDENL[YEGLNLDDCSMY
EDI]SRGLQGTYQDVGSLNIGDVQLEKP (SEQ ID NO:40),

MPGGPGVLQALPATIFLLFLLSAVYLGPGCQALWMHKVPASLMVSLGEDA
HFQCPHNSSNNANVTWWRVLHGNYTWPPEFLGPGEDPNEPPPRPFLDMGE
GTKNRIITAEGIILLFCAVVPGTLLLFRKRWQNEKLGLDAGDEYEDENL[
YEGLNLDDCSMYEDI]SRGLQGTYQDVGSLNIGDVQLEKP(SEQ ID NO
:41), and ENL[YEGLNLDDCSMYEDI]SRG (SEQ ID NO:42);

CD79B with exemplary sequence:

LDKDDSKAGMEEDHT[YEGLDIDQTATYEDI]VTLRTGEVKWSVGEHPGQ
E (SEQ IDNO:211);

DAP12 (also known as TYROBP; TYRO protein tyrosine kinase binding protein; KARAP;PLOSL; DNAX-activation protein 12; KAR-associated protein; TYRO protein tyrosine kinase-binding protein; killer activating receptor associated protein; killer-activating receptor-associated protein; etc.)with exemplary sequences:

MGGLEPCSRLLLLPLLLAVSGLRPVQAQAQSDCSCSTVSPGVLAGIVMGD
LVLTVLIALAVYFLGRLVPRGRGAAEAATRKQRITETESP[YQELQGQRS
DVYSDL]NTQRPYYK (SEQ ID NO:43),

MGGLEPCSRLLLLPLLLAVSGLRPVQAQAQSDCSCSTVSPGVLAGIVMGD
LVLTVLIALAVYFLGRLVPRGRGAAEATRKQRITETESP[YQELQGQRSD
VYSDL]NTQ (SEQ ID NO:44),

MGGLEPCSRLLLLPLLLAVSDCSCSTVSPGVLAGIVMGDLVLTVLIALAV
YFLGRLVPRGRGAAEAATRKQRITETESP[YQELQGQRSDVYSDL]NTQR
PYYK (SEQ ID NO:45),

MGGLEPCSRLLLLPLLLAVSDCSCSTVSPGVLAGIVMGDLVLTVLIALAV
YFLGRLVPRGRGAAEATRKQRITETESP[YQELQGQRSDVYSDL]NTQRP
YYK (SEQ ID NO:46),

and

ESP[YQELQGQRSDVYSDL]NTQ (SEQ ID NO:47);

and FCERlG (also known as FCRG; Fc epsilon receptor I gamma chain; Fc receptor gamma-chain; fc-epsilon RI-gamma; fcRgamma; fceRI gamma; high affinity immunoglobulin epsilon receptor subunit gamma; immunoglobulin E receptor, high affinity, gamma chain; etc.) with exemplary sequences:

MIPAVVLLLLLLVEQAAALGEPQLCYILDAILFLYGIVLTLLYCRLKIQV
RKAAITSYEKSDGV[YTGLSTRNQETYETL]KHEKPPQ (SEQ ID NO:
48)

and

DGV[YTGLSTRNQETYETL]KHE (SEQ IDNO:49),

where the ITAM motifs are set out in brackets.

[0388] Intracellular activating domains suitable for use in an engineered signaling polypeptide of the present disclosure include a DAP10/CD28 type signaling chain. An example of a DAP10 signaling chain is the amino acid SEQ ID NO:50. In some embodiments, a suitable intracellular activating domain includes a domain with at least 50%, 60%, 70%, 75%, 80%, 85%, 90%, 95%, 96%, 97%, 98%, 99% or 100% sequence identity to a stretch of at least 10, 15, 20, or all amino acids in SEQ ID NO:50.

[0389] An example of a CD28 signaling chain is the amino acid sequence is SEQ ID NO:51. In some embodiments, a suitable intracellular domain includes a domain with at least 50%, 60%, 70%, 75%, 80%, 85%, 90%, 95%, 96%, 97%, 98%, 99% or 100% sequence identity to a stretch of at least 10, 15, 20, or all amino acids of SEQ ID NO:51.

[0390] Intracellular activating domains suitable for use in an engineered signaling polypeptide of the present disclosure include a ZAP70 polypeptide, For example, a suitable intracellular activating domain can include a domain with at least 50%, 60%, 70%, 75%, 80%, 85%, 90%, 95%, 96%, 97%, 98%, 99% or 100% sequence identity to a stretch of at least 10, 15, 20, or all amino acids in the following sequences or to a contiguous stretch of from about 300 amino acids to about 400 amino acids, from about 400 amino acids to about 500 amino acids, or from about 500 amino acids to 619 amino acids, of SEQ ID NO:52.

### Modulatory Domains

[0391] Modulatory domains can change the effect of the intracellular activating domain in the engineered signaling polypeptide, including enhancing or dampening the downstream effects of the activating domain or changing the nature of the response. Modulatory domains suitable for use in an engineered signaling polypeptide of the present disclosure include co-stimulatory domains. A modulatory domain suitable for inclusion in the engineered signaling polypeptide can have a length of from about 30 amino acids to about 70 amino acids (aa), e.g., a modulatory domain can have a length of from about 30 aa to about 35 aa, from about 35 aa to about 40 aa, from about 40 aa to about 45 aa, from about 45 aa to about 50 aa, from about 50 aa to about 55 aa, from about 55 aa to about 60 aa, from about 60 aa to about 65 aa, or from about 65 aa to about 70 aa. In other cases, modulatory domain can have a length of from about 70 aa to about 100 aa, from about 100 aa to about 200 aa, or greater than 200 aa.

[0392] Co-stimulatory domains typically enhance and/or change the nature of the response to an activation domain. Co-stimulatory domains suitable for use in an engineered signaling polypeptide of the present disclosure are generally polypeptides derived from receptors. In some embodiments, co-stimulatory domains homodimerize. A subject co-stimulatory domain can be an intracellular portion of a transmembrane protein (i.e., the co-stimulatory domain can be derived from a transmembrane protein). In some embodiments, any of the CAR provided herein can include a costimulatory domain. In some embodiments, the co-stimulatory domain can include a domain with at least 50%, 60%, 70%, 75%, 80%, 85%, 90%, 95%, 96%, 97%, 98%, 99% or 100% sequence identity to a stretch of at least 10, 15, 20, 25, 30, 35, 40, 45, or 50 amino acids or an intracellular domain of 4-1BB (CD137), B7-H3, B7-HCDR3, BAFFR, BTLA, C100 (SEMA4D), CD2, CD4, CD7, CD8A, CD8B, CD11A, CD11B, CD11C, CD11D, CD18, CD19, CD27, CD28, CD28 deleted for Lck binding (ICΔ), CD29, CD30, CD40, CD49A, CD49D, CD49F, CD69, CD84, CD96 (Tactile), CD103, CD160 (BY55), CD162 (SELPLG), CD226 (DNAMl), CD229 (Ly9), a ligand that specifically binds with CD83, CDS, CEACAM1, CRLF2, CRTAM, CSF2RA, CSF2RB, CSF3R, EPOR, Fc receptor gamma chain, Fc receptor ε chain, FCGRA2, GADS, GHR, GITR, HVEM, IA4, ICAM-1, ICOS, IFNAR1, IFNAR2, IFNGR1, IFNGR2, IFNLR1, IL1R1, IL1RAP, IL1RL1, IL1RL2, IL2RA, IL2RB, IL2RG, IL3RA, IL4R, IL5RA, IL6R, IL6ST, IL7RA, IL9R, IL10RA, IL10RB, IL11RA, IL12RB1, IL12RB2, IL13RA1, IL13RA2, IL15RA, IL17RA, IL17RB, IL17RC, IL17RD, IL17RE, IL18R1, IL18RAP, IL20RA, IL20RB, IL21R, IL22RA1, IL23R, IL27RA, IL31RA, ITGA4, ITGA6, ITGAD, ITGAE, ITGAL, ITGAM, ITGAX, ITGB1, ITGB2, ITGB7, LAT, LEPR, LFA-1 (CD11a/CD18), LIGHT, LIFR, LMP1, LTBR, MPL, MYD88, NKG2C, NKP80 (KLRF1), OSMR, OX40, PD-1, PRLR, PSGL1, PAG/Cbp, SLAM (SLAMF1, CD150, IPO-3), SLAMF4 (C244, 2B4), SLAMF6 (NTB-A, Ly108), SLAMF7, SLAMF8 (BLAME), SLP-76, TILR2, TILR4, TILR7, TILR9, TNFR2, TNFRSF4, TNFRSF8, TNFRSF9, TNFRSF14, TNFRSF18, TRANCE/RANKL, VLA1, or VLA-6,or functional mutants and/or fragments thereof.

[0393] A co-stimulatory domain suitable for inclusion in an engineered signaling polypeptide can have a length of from about 30 amino acids to about 70 amino acids (aa), e.g., a co-stimulatory domain can have a length of from about 30 aa to about 35 aa, from about 35 aa to about 40 aa, from about 40 aa to about 45 aa, from about 45 aa to about 50 aa, from about 50 aa to about 55 aa, from about 55 aa to about 60 aa, from about 60 aa to about 65 aa, or from about 65 aa to about 70 aa. In other cases, the co-stimulatory domain can have a length of from about 70 aa to about 100 aa, from about 100 aa to about 200 aa, or greater than 200 aa.

[0394] In some embodiments, a co-stimulatory domain can include a domain with at least 50%, 60%, 70%, 75%, 80%, 85%, 90%, 95%, 96%, 97%, 98%, 99% or 100% sequence identity to a stretch of at least 10, 15, 20, or all the amino acids or from about 30 aa to about 35 aa, from about 35 aa to about 40 aa, from about 40 aa to about 45 aa, from about 45 aa to about 50 aa, from about 50 aa to about 55 aa, from about 55 aa to about 60 aa, from about 60 aa to about 65 aa, or from about 65 aa to about 70 aa, from about 70 aa to about 75 aa, from about 75 aa to about 80 aa, from about 80 aa to about 85 aa, from about 85 aa to about 90 aa, from about 90 aa to about 95 aa, from about 95 aa to about 100 aa, from about 100 amino acids to about 110 amino acids (aa), from about 110 aa to about 115 aa, from about 115 aa to about 120 aa, from about 120 aa to about 130 aa, from about 130 aa to about 140 aa, from about 140 aa to about 150 aa, from about 150 aa to about 160 aa, or from about 160 aa to about 185 aa (depending on how long the intracellular portion of the protein is) of an intracellular portion of: CD137 (also known as TNFRSF9; CD137; 4-1BB; CDw137; ILA; etc.) for example SEQ ID NO:53, CD28 (also known as Tp44) for example SEQ ID NO:54, CD28 deleted for Lck binding (ICΔ) for example SEQ ID NO:55, ICOS (also known as AILIM, CD278, and CVID1) for example SEQ ID NO:56, OX40 (also known as TNFRSF4, RP5-902P8.3, ACT35, CD134, OX-40, TXGP1L) for example SEQ ID NO:57, CD27 (also known as S 152, T 14, TNFRSF7, and Tp55) for example SEQ ID NO:58, BTLA (also known as BTLA1 and CD272) for example SEQ ID NO:59, CD30 (also known as TNFRSF8, D1S166E, and Ki-1), for example SEQ ID NO:60, GITR (also known as TNFRSF18, RP5-902P8.2, AITR, CD357, and GITR-D), for example SEQ ID NO:61, or HVEM (also known as TNFRSF14, RP3-395M20.6, ATAR, CD270, HVEA, HVEM, LIGHTR, and TR2), for example SEQ ID NO:62. OX40 contains a p85 PI3K binding motif at residues 34-57 and a TRAF binding motif at residues 76-102, each of SEQ ID NO: 296 (of Table 1). In some embodiments, the costimulatory domain can include the p85 PI3K binding motif of OX40. In some embodiments, the costimulatory domain can include the TRAF binding motif of OX40. Lysines corresponding to amino acids 17 and 41 of SEQ ID NO: 296 are potentially negative regulatory sites that function as parts of ubiquitin targeting motifs. In some embodiments, one or both of these Lysines in the costimulatory domain of OX40 are mutated Arginines or another amino acid.

### Linker

[0395] In some embodiments, the engineered signaling polypeptide includes a linker between any two adjacent domains. For example, a linker can be between the transmembrane domain and the first co-stimulatory domain. As another example, the ASTR can be an antibody and a linker can be between the heavy chain and the light chain. As another example, a linker can be between the ASTR and the transmembrane domain and a co-stimulatory domain. As another example, a linker can be between the co-stimulatory domain and the intracellular activating domain of the second polypeptide. As another example, the linker can be between the ASTR and the intracellular signaling domain.

[0396] The linker peptide may have any of a variety of amino acid sequences. Proteins can be joined by a spacer peptide, generally of a flexible nature, although other chemical linkages are not excluded. A linker can be a peptide of between about 1 and about 100 amino acids in length, or between about 1 and about 25 amino acids in length. These linkers can be produced by using synthetic, linker-encoding oligonucleotides to couple the proteins. Peptide linkers with a degree of flexibility can be used. The linking peptides may have virtually any amino acid sequence, bearing in mind that suitable linkers will have a sequence that results in a generally flexible peptide. The use of small amino acids, such as glycine and alanine, are of use in creating a flexible peptide. The creation of such sequences is routine to those of skill in the art.

[0397] Suitable linkers can be readily selected and can be of any of a suitable of different lengths, such as from 1 amino acid (e.g., Gly) to 20 amino acids, from 2 amino acids to 15 amino acids, from 3 amino acids to 12 amino acids, including 4 amino acids to 10 amino acids, 5 amino acids to 9 amino acids, 6 amino acids to 8 amino acids, or 7 amino acids to 8 amino acids, and may be 1, 2, 3, 4, 5, 6, or 7 amino acids.

[0398] Exemplary flexible linkers include glycine polymers (G)ₙ, glycine-serine polymers (including, for example, (GS)ₙ, (GSGGS)ₙ, (GGS)ₙ, (GGGS)ₙ, and (GGGGS)ₙ where n is an integer of at least one), glycine-alanine polymers, alanine-serine polymers, and other flexible linkers known in the art. Glycine and glycine-serine polymers are of interest since both of these amino acids are relatively unstructured, and therefore may serve as a neutral tether between components. Glycine polymers are of particular interest since glycine accesses significantly more phi-psi space than even alanine, and is much less restricted than residues with longer side chains (see Scheraga, Rev. Computational Chem. 11173-142 (1992)). Exemplary flexible linkers include, but are not limited GGGGSGGGGS (SEQ ID NO:674),

GGGGSGGGGSGGGGS (SEQ ID NO:63), GGGGSGGGGSGGGGSGGG
GS (SEQ ID NO:372),

GGGGSGGGGSGGGGSGGGGSGGGGS (SEQ ID NO:675),

GGGGSGGGGSGGGGSGGGGSGGGGSGGGGS (SEQ ID NO:64), GGS
SRSS (SEQ ID NO:673),

GGGGSGGGSGGGGS (SEQ ID NO:65), GGSG (SEQ ID NO:66)
, GGSGG (SEQ ID NO:67), GSGSG(SEQ ID NO:68), GSGGG
(SEQ ID NO:69), GGGSG (SEQ ID NO:70), GSSSG (SEQ
ID NO:71), and

the like. The ordinarily skilled artisan will recognize that design of a peptide conjugated to any elements described above can include linkers that are all or partially flexible, such that the linker can include a flexible linker as well as one or more portions that confer less flexible structure.

### Combinations

[0399] In some embodiments, a polynucleotide provided by the replication incompetent recombinant retroviral particles has one or more transcriptional units that encode certain combinations of the one or more engineered signaling polypeptides. In some methods and compositions provided herein, modified and in illustrative embodiments genetically modified T cells include the combinations of the one or more engineered signaling polypeptides after transduction of T cells by the replication incompetent recombinant retroviral particles. It will be understood that the reference of a first polypeptide, a second polypeptide, a third polypeptide, etc. is for convenience and elements on a “first polypeptide” and those on a “second polypeptide” means that the elements are on different polypeptides that are referenced as first or second for reference and convention only, typically in further elements or steps to that specific polypeptide.

[0400] In some embodiments, the first engineered signaling polypeptide includes an extracellular antigen binding domain, which is capable of binding an antigen, and an intracellular signaling domain. In other embodiments, the first engineered signaling polypeptide also includes a T cell survival motif and/or a transmembrane domain. In some embodiments, the first engineered signaling polypeptide does not include a co-stimulatory domain, while in other embodiments, the first engineered signaling polypeptide does include a co-stimulatory domain.

[0401] In some embodiments, a second engineered signaling polypeptide includes a lymphoproliferative gene product and optionally an extracellular antigen binding domain. In some embodiments, the second engineered signaling polypeptide also includes one or more of the following: a T cell survival motif, an intracellular signaling domain, and one or more co-stimulatory domains. In other embodiments, when two engineered signaling polypeptides are used, at least one is a CAR.

[0402] In one embodiment, the one or more engineered signaling polypeptides are expressed under a T cell specific promoter or a general promoter under the same transcript wherein in the transcript, nucleic acids encoding the engineered signaling polypeptides are separated by nucleic acids that encode one or more internal ribosomal entry sites (IREs) or one or more protease cleavage peptides.

[0403] In certain embodiments, the polynucleotide encodes two engineered signaling polypeptides wherein the first engineered signaling polypeptide includes a first extracellular antigen binding domain, which is capable of binding to a first antigen, and a first intracellular signaling domain but not a co-stimulatory domain, and the second polypeptide includes a second extracellular antigen binding domain, which is capable of binding VEGF, and a second intracellular signaling domain, such as for example, the signaling domain of a co-stimulatory molecule. In a certain embodiment, the first antigen is PSCA, PSMA, or BCMA. In a certain embodiment, the first extracellular antigen binding domain comprises an antibody or fragment thereof (e.g., scFv), e.g., an antibody or fragment thereof specific to PSCA, PSMA, or BCMA. In a certain embodiment, the second extracellular antigen binding domain that binds VEGF is a receptor for VEGF, i.e., VEGFR. In certain embodiments, the VEGFR is VEGFR1, VEGFR2, or VEGFR3. In a certain embodiment, the VEGFR is VEGFR2.

[0404] In certain embodiments, the polynucleotide encodes two engineered signaling polypeptides wherein the first engineered signaling polypeptide includes an extracellular tumor antigen binding domain and a CD3ζ signaling domain, and the second engineered signaling polypeptide includes an antigen-binding domain, wherein the antigen is an angiogenic or vasculogenic factor, and one or more co-stimulatory molecule signaling domains. The angiogenic factor can be, e.g., VEGF. The one or more co-stimulatory molecule signaling motifs can comprise, e.g., co-stimulatory signaling domains from each of CD27, CD28, OX40, ICOS, and 4-1BB.

[0405] In certain embodiments, the polynucleotide encodes two engineered signaling polypeptides wherein the first engineered signaling polypeptide includes an extracellular tumor antigen-binding domain and a CD3ζ signaling domain, the second polypeptide comprises an antigen-binding domain, which is capable of binding to VEGF, and co-stimulatory signaling domains from each of CD27, CD28, OX40, ICOS, and 4-1BB. In a further embodiment, the first signaling polypeptide or second signaling polypeptide also has a T cell survival motif. In some embodiments, the T cell survival motif is, or is derived from, an intracellular signaling domain of IL-7 receptor (IL-7R), an intracellular signaling domain of IL-12 receptor, an intracellular signaling domain of IL-15 receptor, an intracellular signaling domain of IL-21 receptor, or an intracellular signaling domain of transforming growth factor β (TGFβ) receptor or the TGFβ decoy receptor (TGF-β-dominant-negative receptor II (DNRII)).

[0406] In certain embodiments, the polynucleotide encodes two engineered signaling polypeptides wherein the first engineered signaling polypeptide includes an extracellular tumor antigen-binding domain and a CD3ζ signaling domain, and the second engineered signaling polypeptide includes an antigen-binding domain, which is capable of binding to VEGF, an IL-7 receptor intracellular T cell survival motif, and co-stimulatory signaling domains from each of CD27, CD28, OX40, ICOS, and 4-1BB.

[0407] In some embodiments, more than two signaling polypeptides are encoded by the polynucleotide. In certain embodiments, only one of the engineered signaling polypeptides includes an antigen binding domain that binds to a tumor-associated antigen or a tumor-specific antigen; each of the remainder of the engineered signaling polypeptides comprises an antigen binding domain that binds to an antigen that is not a tumor-associated antigen or a tumor-specific antigen. In other embodiments, two or more of the engineered signaling polypeptides include antigen binding domains that bind to one or more tumor-associated antigens or tumor-specific antigens, wherein at least one of the engineered signaling polypeptides comprises an antigen binding domain that does not bind to a tumor-associated antigen or a tumor-specific antigen.

[0408] In any of the aspects or embodiments herein that include an ASTR, the antigen can be a tumor-associated antigen or a tumor-specific antigen. In some embodiments, the tumor-associated antigen or tumor-specific antigen is Axl, ROR1, ROR2, Her2 (ERBB2), prostate stem cell antigen (PSCA), PSMA (prostate-specific membrane antigen), B cell maturation antigen (BCMA), alpha-fetoprotein (AFP), carcinoembryonic antigen (CEA), cancer antigen-125 (CA-125), CA19-9, calretinin, chromogranin, protein melan-A (melanoma antigen recognized by T lymphocytes; MART-1), myo-D1, muscle-specific actin (MSA), neurofilament, neuron-specific enolase (NSE), MUC-1, epithelial membrane protein (EMA), epithelial tumor antigen (ETA), tyrosinase, melanoma-associated antigen (MAGE), MAGE-Al, high molecular weight-melanoma associated antigen (HMW-MAA), placental alkaline phosphatase, synaptophysin, thyroglobulin, thyroid transcription factor-1, the dimeric form of the pyruvate kinase isoenzyme type M2 (tumor M2-PK), CD19, CD20, CD22, CD23, CD24, CD27, CD30, CD33, CD34, CD37, CD38, CD40, CD44, CD44v6, CD44v⅞, CD45, CD70, CD99, CD117, CD123, CD138, CD171, GD2 (ganglioside G2), EphA2, CSPG4, FAP (Fibroblast Activation Protein), kappa, lambda, 5T4, αvβ6 integrin, integrin αvβ3 (CD61), galactin, K-Ras (V-Ki-ras2 Kirsten rat sarcoma viral oncogene), Ral-B, B7-H3, B7-H6, CAIX, EGFR, EGP2, EGP40, EpCAM, fetal AchR, FRα, GD3, HLA-A1+MAGE1, HLA-A1+NY-ESO-1, HLA-DR, IL-11Ra, IL-13Rα2, Lewis-Y, Muc16, NCAM, NKG2D Ligands, PRAME, Survivin, TAG72, TEMs, VEGFR2, EGFRvIII (epidermal growth factor variant III), sperm protein 17 (Sp17), mesothelin, PAP (prostatic acid phosphatase), prostein, TARP (T cell receptor gamma alternate reading frame protein), Trp-p8, STEAP1 (six-transmembrane epithelial antigen of the prostate 1), an abnormal ras protein, an abnormal p53 protein, New York esophageal squamous cell carcinoma antigen (NYESO1), or PDL-1.

[0409] In some embodiments, the first engineered signaling polypeptide includes a first extracellular antigen binding domain that binds a first antigen, and a first intracellular signaling domain; and a second engineered signaling polypeptide includes a second extracellular antigen binding domain that binds a second antigen, or a receptor that binds the second antigen; and a second intracellular signaling domain, wherein the second engineered signaling polypeptide does not comprise a co-stimulatory domain. In a certain embodiment, the first antigen-binding domain and the second antigen-binding domain are independently an antigen-binding portion of a receptor or an antigen-binding portion of an antibody. In a certain embodiment, either or both of the first antigen binding domain or the second antigen binding domain are scFv antibody fragments. In certain embodiments, the first engineered signaling polypeptide and/or the second engineered signaling polypeptide additionally comprises a transmembrane domain. In a certain embodiment, the first engineered signaling polypeptide or the second engineered signaling polypeptide comprises a T cell survival motif, e.g., any of the T cell survival motifs described herein.

[0410] In another embodiment, the first engineered signaling polypeptide includes a first extracellular antigen binding domain that binds HER2 and the second engineered signaling polypeptide includes a second extracellular antigen binding domain that binds MUC-1.

[0411] In another embodiment, the second extracellular antigen binding domain of the second engineered signaling polypeptide binds an interleukin.

[0412] In another embodiment, the second extracellular antigen binding domain of the second engineered signaling polypeptide binds a damage associated molecular pattern molecule (DAMP; also known as an alarmin). In other embodiments, a DAMP is a heat shock protein, chromatin-associated protein high mobility group box 1 (HMGB1), S100A8 (also known as MRP8, or calgranulin A), S100A9 (also known as MRP14, or calgranulin B), serum amyloid A (SAA), deoxyribonucleic acid, adenosine triphosphate, uric acid, or heparin sulfate.

[0413] In certain embodiments, said second antigen is an antigen on an antibody that binds to an antigen presented by a tumor cell.

[0414] In some embodiments, signal transduction activation through the second engineered signaling polypeptide is non-antigenic, but is associated with hypoxia. In certain embodiments, hypoxia is induced by activation of hypoxia-inducible factor-1α (HIF-1α), HIF-1β, HIF-2α, HIF-2β, HIF-3α, or HIF-3p.

[0415] In some embodiments, for example for modifying, genetically modifying, and/or transducing lymphocytes to be introduced or reintroduced by subcutaneous injection, expression of the one or more engineered signaling polypeptides is regulated by a control element, which is disclosed in more detail herein.

### Additional Sequences

[0416] The engineered signaling polypeptides, such as CARs, can further include one or more additional polypeptide domains, where such domains include, but are not limited to, a signal sequence; an epitope tag; an affinity domain; and a polypeptide whose presence or activity can be detected (detectable marker), for example by an antibody assay or because it is a polypeptide that produces a detectable signal. Non-limiting examples of additional domains for any of the aspects or embodiments provided herein, include a domain with at least 50%, 60%, 70%, 75%, 80%, 85%, 90%, 95%, 96%, 97%, 98%, 99% or 100% sequence identity to any of the following sequences as described below: a signal sequence, an epitope tag, an affinity domain, or a polypeptide that produces a detectable signal.

[0417] Signal sequences that are suitable for use in a subject CAR, e.g., in the first polypeptide of a subject CAR, include any eukaryotic signal sequence, including a naturally-occurring signal sequence, a synthetic (e.g., man-made) signal sequence, etc. In some embodiments, for example, the signal sequence can be the CD8 signal sequence MALPVTALLLPLALLLHAARP (SEQ ID NO:72).

[0418] Suitable epitope tags include, but are not limited to, hemagglutinin (HA; e.g., YPYDVPDYA; SEQ ID NO:73); FLAG (e.g., DYKDDDDK; SEQ ID NO:74); c-myc (e.g., EQKLISEEDL; SEQ ID NO:75), and the like.

[0419] Affinity domains include peptide sequences that can interact with a binding partner, e.g., such as one immobilized on a solid support, useful for identification or purification. DNA sequences encoding multiple consecutive single amino acids, such as histidine, when fused to the expressed protein, may be used for one-step purification of the recombinant protein by high affinity binding to a resin column, such as nickel sepharose. Exemplary affinity domains include His5 (HHHHH; SEQ ID NO:76), HisX6 (HHHHHH; SEQ ID NO:77), c-myc (EQKLISEEDL; SEQ ID NO:75), Flag (DYKDDDDK; SEQ ID NO:74), Strep Tag (WSHPQFEK; SEQ ID NO:78), hemagglutinin, e.g., HA Tag (YPYDVPDYA; SEQ ID NO:73), GST, thioredoxin, cellulose binding domain, RYIRS (SEQ ID NO:79), Phe-His-His-Thr (SEQ ID NO:80), chitin binding domain, S-peptide, T7 peptide, SH2 domain, C-end RNA tag, WEAAAREACCRECCARA (SEQ ID NO:81), metal binding domains, e.g., zinc binding domains or calcium binding domains such as those from calcium-binding proteins, e.g., calmodulin, troponin C, calcineurin B, myosin light chain, recoverin, S-modulin, visinin, VILIP, neurocalcin, hippocalcin, frequenin, caltractin, calpain large-subunit, S100proteins, parvalbumin, calbindin D9K, calbindin D28K, and calretinin, inteins, biotin, streptavidin, MyoD, Id, leucine zipper sequences, and maltose binding protein.

[0420] Suitable detectable signal-producing proteins include, e.g., fluorescent proteins; enzymes that catalyze a reaction that generates a detectable signal as a product; and the like.

[0421] Suitable fluorescent proteins include, but are not limited to, green fluorescent protein (GFP) or variants thereof, blue fluorescent variant of GFP (BFP), cyan fluorescent variant of GFP (CFP), yellow fluorescent variant of GFP (YFP), enhanced GFP (EGFP), enhanced CFP (ECFP), enhanced YFP (EYFP), GFPS65T, Emerald, Topaz (TYFP), Venus, Citrine, mCitrine, GFPuv, destabilized EGFP (dEGFP), destabilized ECFP (dECFP), destabilized EYFP (dEYFP), mCFPm, Cerulean, T-Sapphire, CyPet, YPet, mKO, HcRed, t-HcRed, DsRed, DsRed2, DsRed-monomer, J-Red, dimer2, t-dimer2(12), mRFPl, pocilloporin, Renilla GFP, Monster GFP, paGFP, Kaede protein and kindling protein, Phycobiliproteins and Phycobiliprotein conjugates including B-Phycoerythrin, R-Phycoerythrin and Allophycocyanin. Other examples of fluorescent proteins include mHoneydew, mBanana, mOrange, dTomato, tdTomato, mTangerine, mStrawberry, mCherry, mGrapel, mRaspberry, mGrape2, mPlum (Shaner et al. (2005) Nat. Methods 2:905-909), and the like. Any of a variety of fluorescent and colored proteins from Anthozoan species, as described in, e.g., Matz et al. (1999) Nature Biotechnol. 17:969-973, is suitable for use.

[0422] Suitable enzymes include, but are not limited to, horse radish peroxidase (HRP), alkaline phosphatase (AP), beta-galactosidase (GAL), glucose-6-phosphate dehydrogenase, beta-N-acetylglucosaminidase, β-glucuronidase, invertase, Xanthine Oxidase, firefly luciferase, glucose oxidase (GO), and the like.

### Chimeric Antigen Receptor

[0423] In some aspects of the present invention, an engineered signaling polypeptide is a chimeric antigen receptor (CAR) or a polynucleotide encoding a CAR, which, for simplicity, is referred to herein as “CAR.” A CAR of the present disclosure includes: a) at least one antigen-specific targeting region (ASTR); b) a transmembrane domain; and c) an intracellular activating domain. In illustrative embodiments, the antigen-specific targeting region of the CAR is an scFv portion of an antibody to the target antigen. In illustrative embodiments, the intracellular activating domain is from CD3Z, CD3D, CD3E, CD3G, CD79A, CD79B, DAP12, FCERlG, FCGR2A, FCGR2C, DAP10/CD28, or ZAP70, and some further illustrative embodiments, from CD3z. In illustrative embodiments, the CAR further comprises a co-stimulatory domain, for example any of the co-stimulatory domains provided above in the Modulatory Domains section, and in further illustrative embodiments the co-stimulatory domain is the intracellular co-stimulatory domain of 4-1BB (CD137), CD28, ICOS, OX-40, BTLA, CD27, CD30, GITR, and HVEM. In some embodiments, the CAR includes any of the transmembrane domains listed in the Transmembrane Domain section above.

[0424] A CAR of the present disclosure can be present in the plasma membrane of a eukaryotic cell, e.g., a mammalian cell, where suitable mammalian cells include, but are not limited to, a cytotoxic cell, a T lymphocyte, a stem cell, a progeny of a stem cell, a progenitor cell, a progeny of a progenitor cell, and an NK cell, an NK-T cell, and a macrophage. When present in the plasma membrane of a eukaryotic cell, a CAR of the present disclosure is active in the presence of one or more target antigens that, in certain conditions, binds the ASTR. The target antigen is the second member of the specific binding pair. The target antigen of the specific binding pair can be a soluble (e.g., not bound to a cell) factor; a factor present on the surface of a cell such as a target cell; a factor presented on a solid surface; a factor present in a lipid bilayer; and the like. Where the ASTR is an antibody, and the second member of the specific binding pair is an antigen, the antigen can be a soluble (e.g., not bound to a cell) antigen; an antigen present on the surface of a cell such as a target cell; an antigen presented on a solid surface; an antigen present in a lipid bilayer; and the like.

[0425] In some embodiments, the ASTR of a CAR is expressed as a separate polypeptide from the intracellular signaling domain. In such embodiments, one or both of the polypeptides can include any of the transmembrane domains disclosed herein. In some embodiments, one or both of the polypeptides can include a heterologous signal sequence and/or a heterologous membrane attachment sequence. In some embodiments, the heterologous membrane attachment sequence is a GPI anchor attachment sequence.

[0426] In some instances, a CAR of the present disclosure, when present in the plasma membrane of a eukaryotic cell, and when activated by one or more target antigens, increases expression of at least one nucleic acid in the cell. For example, in some cases, a CAR of the present disclosure, when present in the plasma membrane of a eukaryotic cell, and when activated by the one or more target antigens, increases expression of at least one nucleic acid in the cell by at least about 10%, at least about 15%, at least about 20%, at least about 25%, at least about 30%, at least about 40%, at least about 50%, at least about 75%, at least about 2-fold, at least about 2.5-fold, at least about 5-fold, at least about 10-fold, or more than 10-fold, compared with the level of transcription of the nucleic acid in the absence of the one or more target antigens.

[0427] As an example, the CAR of the present disclosure can include an immunoreceptor tyrosine-based activation motif (ITAM)-containing intracellular signaling polypeptide.

[0428] A CAR of the present disclosure, when present in the plasma membrane of a eukaryotic cell, and when activated by one or more target antigens, can, in some instances, result in increased production of one or more cytokines by the cell. For example, a CAR of the present disclosure, when present in the plasma membrane of a eukaryotic cell, and when activated by the one or more target antigens, can increase production of a cytokine by the cell by at least about 10%, at least about 15%, at least about 20%, at least about 25%, at least about 30%, at least about 40%, at least about 50%, at least about 75%, at least about 2-fold, at least about 2.5-fold, at least about 5-fold, at least about 10-fold, or more than 10-fold, compared with the amount of cytokine produced by the cell in the absence of the one or more target antigens. Cytokines whose production can be increased include, but are not limited to interferon gamma (IFN-γ), tumor necrosis factor-alpha (TNF-a), IL-2, IL-15, IL-12, IL-4, IL-5, IL-10; a chemokine; a growth factor; and the like.

[0429] In some embodiments, a CAR of the present disclosure, when present in the plasma membrane of a eukaryotic cell, and when activated by one or more target antigens, can result in both an increase in transcription of a nucleic acid in the cell and an increase in production of a cytokine by the cell.

[0430] In some instances, a CAR of the present disclosure, when present in the plasma membrane of a eukaryotic cell, and when activated by one or more target antigens, results in cytotoxic activity by the cell toward a target cell that expresses on its cell surface an antigen to which the antigen-binding domain of the first polypeptide of the CAR binds. For example, where the eukaryotic cell is a cytotoxic cell (e.g., an NK cell or a cytotoxic T lymphocyte), a CAR of the present disclosure, when present in the plasma membrane of the cell, and when activated by the one or more target antigens, increases cytotoxic activity of the cell toward a target cell that expresses on its cell surface the one or more target antigens. For example, where the eukaryotic cell is an NK cell or a T lymphocyte, a CAR of the present disclosure, when present in the plasma membrane of the cell, and when activated by the one or more target antigens, increases cytotoxic activity of the cell by at least about 10%, at least about 15%, at least about 20%, at least about 25%, at least about 30%, at least about 40%, at least about 50%, at least about 75%, at least about 2-fold, at least about 2.5-fold, at least about 5-fold, at least about 10-fold, or more than 10-fold, compared to the cytotoxic activity of the cell in the absence of the one or more target antigens.

[0431] In some embodiments, a CAR of the present disclosure, when present in the plasma membrane of a eukaryotic cell, and when activated by one or more target antigens, can result in other CAR activation related events such as proliferation and expansion (either due to increased cellular division or anti-apoptotic responses).

[0432] In some embodiments, a CAR of the present disclosure, when present in the plasma membrane of a eukaryotic cell, and when activated by one or more target antigens, can result in other CAR activation related events such as intracellular signaling modulation, cellular differentiation, or cell death.

[0433] In some embodiments, CARs of the present disclosure are microenvironment restricted. This property is typically the result of the microenvironment restricted nature of the ASTR domain of the CAR. Thus, CARs of the present disclosure can have a lower binding affinity or, in illustrative embodiments, can have a higher binding affinity to one or more target antigens under a condition(s) in a microenvironment than under a condition in a normal physiological environment.

[0434] In certain illustrative embodiments, CARs provided herein comprise a co-stimulatory domain in addition to an intracellular activating domain, wherein the co-stimulatory domain is any of the intracellular signaling domains provided herein for lymphoproliferative elements (LEs), such as, for example, intracellular domains of CLEs. In certain illustrative embodiments, the co-stimulatory domains of CARs herein are first intracellular domains (P3 domains) identified herein for CLEs or P4 domains that are shown as effective intracellular signaling domains of CLEs herein in the absence of a P3 domain. Furthermore, in certain illustrative embodiments, co-stimulatory domains of CARs can comprise both a P3 and a P4 intracellular signaling domain identified herein for CLEs. Certain illustrative subembodiments include especially effective P3 and P4 partner intracellular signaling domains as identified herein for CLEs. In illustrative embodiments, the co-stimulatory domain is other than an ITAM-containing intracellular domain of a CAR either as part of the co-stimulatory domain, or in further illustrative embodiments as the only co-stimulatory domain.

[0435] In these embodiments that include a CAR with a co-stimulatory domain identified herein as an effective intracellular domain of an LE, the co-stimulatory domain of a CAR can be any intracellular signaling domain in Table 1 provided herein. Active fragments of any of the intracellular domains in Table 1 can be a co-stimulatory domain of a CAR. In illustrative embodiments, the ASTR of the CAR comprises an scFv. In illustrative embodiments, in addition to the c-stimulatory intracellular domain of a CLE, these CARs comprise an intracellular activating domain that in illustrative embodiments is a CD3Z, CD3D, CD3E, CD3G, CD79A, CD79B, DAP12, FCER1G, FCGR2A, FCGR2C. DAP10/CD28, or ZAP70 intracellular activating domain, or in further illustrative embodiments is a CD3z intracellular activating domain.

[0436] In these illustrative embodiments, the co-stimulatory domain of a CAR can comprise an intracellular domain or a functional signaling fragment thereof that includes a signaling domain from CSF2RB, CRLF2, CSF2RA, CSF3R, EPOR, GHR, IFNAR1, IFNAR2, IFNGR1, IFNGR2, IFNLR1, IL1R1, IL1RAP, IL1RL1, IL1RL2, IL2RA, IL2RB, IL2RG, IL3RA, IL5RA, IL6R, IL6ST, IL7RA, IL9R, IL10RA, IL10RB, IL11RA, IL12RB1, IL12RB2, IL13RA1, IL13RA2, IL15RA, IL17RB, IL17RC, IL17RD, IL18R1, IL18RAP, IL20RA, IL20RB, IL21R, IL22RA1, IL23R, IL27RA, IL31RA, LEPR, LIFR, LMP1, MPL, MyD88, OSMR, or PRLR. In some embodiments, the co-stimulatory domain of a CAR can include an intracellular domain or a functional signaling fragment thereof that includes a signaling domain from CSF2RB, CRLF2, CSF2RA, CSF3R, EPOR, GHR, IFNAR1, IFNAR2, IFNGR1, IFNGR2, IFNLR1, IL1R1, IL1RAP, IL1RL1, IL1RL2, IL2RA, IL2RB, IL2RG, IL3RA, IL5RA, IL6R, IL6ST, IL9R, IL10RA, IL10RB, IL11RA, IL13RA1, IL13RA2, IL17RB, IL17RC, IL17RD, IL18R1, IL18RAP, IL20RA, IL20RB, IL22RA1, IL31RA, LEPR, LIFR, LMP1, MPL, MyD88, OSMR, or PRLR. In some embodiments, the co-stimulatory domain of a CAR can include an intracellular domain or a functional fragment thereof that includes a signaling domain from CSF2RB, CSF2RA, CSF3R, EPOR, IFNGR1, IFNGR2, IL1R1, IL1RAP, IL1RL1, IL2RA, IL2RG, IL5RA, IL6R, IL9R, IL10RB, IL11RA, IL12RB1, IL12RB2, IL13RA2, IL15RA, IL17RD, IL21R, IL23R, IL27RA, IL31RA, LEPR, MPL, MyD88, or OSMR. In some embodiments, the co-stimulatory domain of a CAR can include an intracellular domain or a fragment thereof that includes a signaling domain from CSF2RB, CSF2RA, CSF3R, EPOR, IFNGR1, IFNGR2, IL1R1, IL1RAP, IL1RL1, IL2RA, IL2RG, IL5RA, IL6R, IL9R, IL10RB, IL11RA, IL13RA2, IL17RD, IL31RA, LEPR, MPL, MyD88, or OSMR. In some embodiments, the co-stimulatory domain of a CAR can include an intracellular domain or a functional signaling fragment thereof that includes a signaling domain from CSF2RB, CSF3R, IFNAR1, IFNGR1, IL2RB, IL2RG, IL6ST, IL10RA, IL12RB2, IL17RC, IL17RE, IL18R1, IL27RA, IL31RA, MPL, MyD88, OSMR, or PRLR. In some embodiments, the co-stimulatory domain of a CAR can include an intracellular domain or a functional signaling fragment thereof that includes a signaling domain from CSF2RB, CSF3R, IFNGR1, IL2RB, IL2RG, IL6ST, IL10RA, IL17RE, IL31RA, MPL, or MyD88.

[0437] In some embodiments, the co-stimulatory domain of a CAR can include an intracellular domain or a fragment thereof that includes a signaling domain from CSF3R, IL6ST, IL27RA, MPL, and MyD88. In certain illustrative subembodiments, the intracellular activating domain of the CAR is derived from CD3z.

### Recombinant T Cell Receptors (TCRs)

[0438] T Cell Receptors (TCRs) recognize specific protein fragments derived from intracellular as well as extracellular proteins. When proteins are broken into peptide fragments, they are presented on the cell surface with another protein called major histocompatibility complex, or MHC, which is called the HLA (human leukocyte antigen) complex in humans. Three different T cell antigen receptors combinations in vertebrates are αβ TCR, γδTCR and pre-TCR. Such combinations are formed by dimerization between members of dimerizing subtypes, such as an α TCR subunit and a β TCR subunit, a γ TCR subunit and a δ TCR subunit, and for pre-TCRs, a pTα subunit and a β TCR subunit. A set of TCR subunits dimerize and recognize a target peptide fragment presented in the context of an MHC. The pre-TCR is expressed only on the surface of immature αβ T cells while the αß TCR is expressed on the surface of mature αβ T cells and NK T cells, and γδTCR is expressed on the surface of γδT cells. αβTCRs on the surface of a T cell recognize the peptide presented by MHCI or MHCII and the αβ TCR on the surface of NK T cells recognize lipid antigens presented by CD1. γδTCRs can recognize MHC and MHC-like molecules, and can also recognize non-MHC molecules such as viral glycoproteins. Upon ligand recognition, αβTCRs and γδTCRs transmit activation signals through the CD3zeta chain that stimulate T cell proliferation and cytokine secretion.

[0439] TCR molecules belong to the immunoglobulin superfamily with its antigen-specific presence in the V region, where CDR3 has more variability than CDR1 and CDR2, directly determining the antigen binding specificity of the TCR. When the MHC-antigen peptide complex is recognized by a TCR, the CDR1 and CDR2 recognize and bind the sidewall of the MHC molecule antigen binding channel, and the CDR3 binds directly to the antigenic peptide. Recombinant TCRs may thus be engineered that recognize a tumor-specific protein fragment presented on MHC.

[0440] Recombinant TCR’s such as those derived from human TCRα and TCRβ pairs that recognize specific peptides with common HLAs can thus be generated with specificity to a tumor specific protein (Schmitt, TM et al., 2009). The target of recombinant TCRs may be peptides derived from any of the antigen targets for CAR ASTRs provided herein, but are more commonly derived from intracellular tumor specific proteins such as oncofetal antigens, or mutated variants of normal intracellular proteins or other cancer specific neoepitopes. In some embodiments, the recombinant TCR binds to the idiotype of an antibody. In such embodiments, the TCR is an anti-idiotype polypeptide as disclosed in more detail herein. Libraries of TCR subunits may be screened for their selectivity to a target antigen. Screens of natural and/or recombinant TCR subunits can identify sets of TCR subunits with high avidities and/or reactivities towards a target antigen. Members of such sets of TCR subunits can be selected and cloned to produce one or more polynucleotide encoding the TCR subunit.

[0441] Polynucleotides encoding such a set of TCR subunits can be included in a replication incompetent recombinant retroviral particle to genetically modify a lymphocyte, or in illustrative embodiments, a T cell or an NK cell, such that the lymphocyte expresses the recombinant TCR. Accordingly, in any aspect or embodiment provided herein that includes a polynucleotide encoding a CAR or an engineered signaling polypeptide that is a CAR, the CAR can be replaced by a set of γδTCR chains, or in illustrative embodiments αβTCR chains. TCR chains that form a set may be co-expressed using a number of different techniques to co-express the two TCR chains as is disclosed herein for expressing two or more other engineered signaling polypeptides such as CARs and lymphoproliferative elements. For example, protease cleavage epitopes such as 2A protease, internal ribosomal entry sites (IRES), and separate promoters may be used.

[0442] Several strategies have been employed to reduce the likelihood of mixed TCR dimer formation. In general, this involves modification of the constant (C) domains of the TCRα and TCRβ chains to promote the preferential pairing of the introduced TCR chains with each other, while rendering them less likely to successfully pair with endogenous TCR chains. One approach that has shown some promise in vitro involves replacement of the C domain of human TCRα and TCRβ chains with their mouse counterparts. Another approach involves mutation of the human TCRα common domain and TCRβ chain common regions to promote self-pairing, or the expression of an endogenous TCR alpha and TCR beta miRNA within the viral gene construct. Accordingly, in some embodiments provided herein that include one or more sets of TCR chains as engineered signaling polypeptides, each member of the set of TCR chains, in illustrative embodiments αβTCR chains, comprises a modified constant domain that promotes preferential pairing with each other. In some subembodiments, each member of a set of TCR chains, in illustrative embodiments αβTCR chains, comprises a mouse constant domain from the same TCR chain type, or a constant domain from the same TCR chain subtype with enough sequences derived from a mouse constant domain from the same TCR chain subtype, such that dimerization of the set of TCR chains to each other is preferred over, or occurs to the exclusion of, dimerization with human TCR chains. In other subembodiments, each member of a set of TCR chains, in illustrative embodiments αβTCR chains, comprises corresponding mutations in its constant domain, such that dimerization of the set of TCR chains to each other is preferred over, or occurs to the exclusion of, dimerization with TCR chains that have human constant domains. Such preferred or exclusive dimerization in illustrative embodiments, is under physiological conditions.

[0443] In some embodiments provided herein that include one or more sets of TCR chains as engineered signaling polypeptides, the constant regions of the members of each of the one or more sets of TCR chains are swapped. Thus, the α TCR subunit of the set has a β TCR constant region, and the β TCR subunit of the set has a α TCR constant region. Not to be limited by theory, it is believed that such swapping may prevent mispairing with endogenous counterparts.

### Lymphoproliferative Elements

[0444] Many of the embodiments provided herein include a lymphoproliferative element, or a nucleic acid encoding the same, typically as part of an engineered signaling polypeptide. Accordingly, in some aspects of the present invention, for example for modified and/or genetically modified lymphocytes to be introduced or reintroduced by subcutaneous injection, an engineered signaling polypeptide is a lymphoproliferative element (LE) such as a chimeric lymphoproliferative element (CLE). Typically, the LE comprises an extracellular domain, a transmembrane domain, and at least one intracellular signaling domain that drives proliferation, and in illustrative embodiments a second intracellular signaling domain.

[0445] The extracellular domains, transmembrane domains, and intracellular domains of LEs can vary in their respective amino acid lengths. For example, for embodiments that include a replication incompetent retroviral particle (RIP), there are limits to the length of a polynucleotide that can be packaged into a retroviral particle so LEs with shorter amino acid sequences can be advantageous in certain illustrative embodiments. In some embodiments, the overall length of the LE can be between 3 and 4000 amino acids, for example between 10 and 3000, 10 and 2000, 50 and 2000, 250 and 2000 amino acids, and, in illustrative embodiments between 50 and 1000, 100 and 1000 or 250 and 1000 amino acids. The extracellular domain, when present to form an extracellular and transmembrane domain, can be between 1 and 1000 amino acids, and is typically between 4 and 400, between 4 and 200, between 4 and 100, between 4 and 50, between 4 and 25, or between 4 and 20 amino acids. In one embodiment, the extracellular region is GGGS for an extracellular and transmembrane domain of this aspect of the invention. The transmembrane domains, or transmembrane regions of extracellular and transmembrane domains, can be between 10 and 250 amino acids, and are more typically at least 15 amino acids in length, and can be, for example, between 15 and 100, 15 and 75, 15 and 50, 15 and 40, or 15 and 30 amino acids in length. The intracellular signaling domains can be, for example, between 10 and 1000, 10 and 750, 10 and 500, 10 and 250, or 10 and 100 amino acids. In illustrative embodiments, the intracellular signaling domain can be at least 30, or between 30 and 500, 30 and 250, 30 and 150, 30 and 100, 50 and 500, 50 and 250, 50 and 150, or 50 and 100 amino acids. In some embodiments, an intracellular signaling domain for a particular gene is at least 50%, 60%, 70%, 75%, 80%, 85%, 90%, 95%, 98%, 99% or 100% identical to at least 10, 25, 30, 40, 50, or all the amino acids from a sequence of that intracellular signaling domain, such as a sequence provided herein for that intracellular domain, up to the size of the entire intracellular domain sequence, and can include for example, up to an additional 1, 2, 3, 4, 5, 10, 20, or 25 amino acids, provided that such sequence still is capable of providing any of the properties of LEs disclosed herein.

[0446] In some embodiments, the lymphoproliferative element can include a first and/or second intracellular signaling domain. In some embodiments, the first and/or second intracellular signaling domain can include CD2, CD3D, CD3E, CD3G, CD4, CD8A, CD8B, CD27, mutated Delta Lck CD28, CD28, CD40, CD79A, CD79B, CRLF2, CSF2RB, CSF2RA, CSF3R, EPOR, FCER1G, FCGR2C, FCGRA2, GHR, ICOS, IFNAR1, IFNAR2, IFNGR1, IFNGR2, IFNLR1, IL1R1, IL1RAP, IL1RL1, IL1RL2, IL2RA, IL2RB, IL2RG, IL3RA, IL4R, IL5RA, IL6R, IL6ST, IL7RA, IL9R, IL10RA, IL10RB, IL11RA, IL12RB1, IL12RB2, IL13RA1, IL13RA2, IL15RA, IL17RA, IL17RB, IL17RC, IL17RD, IL17RE, IL18R1, IL18RAP, IL20RA, IL20RB, IL21R, IL22RA1, IL23R, IL27RA, IL31RA, LEPR, LIFR, LMP1, MPL, MYD88, OSMR, PRLR, TNFRSF4, TNFRSF8, TNFRSF9, TNFRSF14, or TNFRSF18, or functional mutants and/or fragments thereof. In illustrative embodiments, the first intracellular signaling domain can include MyD88, or a functional mutant and/or fragment thereof. In further illustrative embodiments, the first intracellular signaling domain can include MyD88, or a functional mutant and/or fragment thereof, and the second intracellular signaling domain can include ICOS, TNFRSF4, or TNSFR18, or functional mutants and/or fragments thereof. In some embodiments, the first intracellular domain is MyD88 and the second intracellular domain is an ITAM-containing intracellular domain, for example, an intracellular domain from CD3Z, CD3D, CD3E, CD3G, CD79A, CD79B, DAP12, FCER1G, FCGR2A, FCGR2C, DAP10/CD28, or ZAP70. In some embodiments, the second intracellular signaling domain can include TNFRSF18, or a functional mutant and/or fragment thereof.

[0447] In some embodiments, the lymphoproliferative element can include a fusion of an extracellular domain and a transmembrane domain. In some embodiments, the fusion of an extracellular domain and a transmembrane domain can include eTAG IL7RA Ins PPCL (interleukin 7 receptor), Myc LMP1, LMP1, eTAG CRLF2, eTAG CSF2RB, eTAG CSF3R, eTAG EPOR, eTAG GHR, eTAG truncated after Fn F523C IL27RA, or eTAG truncated after Fn S505N MPL, or functional mutants and/or fragments thereof. In some embodiments, the lymphoproliferative element can include an extracellular domain. In some embodiments, the extracellular domain can include cell tag with 0, 1, 2, 3, or 4 additional alanines at the carboxy terminus. In some embodiments, the extracellular domain can include Myc or an eTAG with 0, 1, 2, 3, or 4 additional alanines at the carboxy terminus, or functional mutants and/or fragments thereof. For any embodiment of a lymphoproliferative element disclosed herein that includes a cell tag, there is a corresponding embodiment that is identical but lacks the cell tag and optionally lacks any linker sequence that connected the cell tag to the lymphoproliferative element.

[0448] In some embodiments, the lymphoproliferative element can include a transmembrane domain. In some embodiments, the transmembrane domain can include a transmembrane domain from BAFFR, C3Z, CEACAM1, CD2, CD3A, CD3B, CD3D, CD3E, CD3G, CD3Z, CD4, CD5, CD7, CD8A, CD8B, CD9, CD11A, CD11B, CD11C, CD11D, CD27, CD16, CD18, CD19, CD22, CD28, CD29, CD33, CD37, CD40, CD45, CD49A, CD49D, CD49F, CD64, CD79A, CD79B, CD80, CD84, CD86, CD96 (Tactile), CD100 (SEMA4D), CD103, C134, CD137, CD154, CD160 (BY55), CD162 (SELPLG), CD226 (DNAM1), CD229 (Ly9), CD247, CRLF2, CRTAM, CSF2RA, CSF2RB, CSF3R, EPOR, FCER1G, FCGR2C, FCGRA2, GHR, HVEM (LIGHTR), IA4, ICOS, IFNAR1, IFNAR2, IFNGR1, IFNGR2, IFNLR1, IL1R1, IL1RAP, IL1RL1, IL1RL2, IL2RA, IL2RB, IL2RG, IL3RA, IL4R, IL5RA, IL6R, IL6ST, IL7RA, IL7RA Ins PPCL, IL9R, IL10RA, IL10RB, IL11RA, IL12RB1, IL12RB2, IL13RA1, IL13RA2, IL15RA, IL17RA, IL17RB, IL17RC, IL17RD, IL17RE, IL18R1, IL18RAP, IL20RA, IL20RB, IL21R, IL22RA1, IL23R, IL27RA, IL31RA, ITGA1, ITGA4, ITGA6, ITGAD, ITGAE, ITGAL, ITGAM, ITGAX, ITGB1, ITGB2, ITGB7, KIRDS2, LEPR, LFA-1 (CD11a, CD18), LIFR, LTBR, MPL, NKp80 (KLRF1), OSMR, PAG/Cbp, PRLR, PSGL1, SLAM (SLAMF1, CD150, IPO-3), SLAMF4 (CD244, 2B4), SLAMF6 (NTB-A, Ly108), SLAMF7, SLAMF8 (BLAME), TNFR2, TNFRSF4, TNFRSF8, TNFRSF9, TNFRSF14, TNFRSF18, VLA1, or VLA-6, or functional mutants and/or fragments thereof.

[0449] CLEs for use in any aspect or embodiment herein can include any CLE disclosed in WO2019/055946 (incorporated by reference herein, in its entirety), the vast majority of which were designed to be and are believed to be constitutively active typically because they constitutively activate a signaling pathway, typically through functional domains on their intracellular domains. In some embodiments, the constitutively active signaling pathways include activation of a Jak pathway, a Stat pathway, or Jak/Stat pathways including Jak1, Jak2, Jak3, and Tyk2 and STATs such as STAT1, STAT2, STAT3, STAT4, STAT5, STAT6, and in illustrative embodiments, STAT3 and/or STAT5. Accordingly, provided herein in certain embodiments, are lymphoproliferative elements that comprises a means for activating any one or more of these pathways, and typically an intracellular domain that is a means for activating any one or more of these pathways. In certain embodiments, lymphoproliferative elements comprise a means, such as an intracellular domain that is a means, for transmitting a signal that promotes proliferation of a T cell and/or NK cell, in illustrative embodiments when part of a dimerized lymphoproliferative element. In some embodiments, a CLE includes one or more STAT-activation domains. In some embodiments, a CLE includes two or more, three or more, four or more, five or more, or six or more STAT-activation domains. In some embodiments, at least one of the one or more STAT-activation domains is, or is derived from BLNK, IL2RG, EGFR, EpoR, GHR, IFNAR1, IFNAR2, IFNAR½, IFNLR1, IL10R1, IL12Rb1, IL12Rb2, IL21R, IL2Rb, IL2small, IL7R, IL7Ra, IL9R, IL15R, and IL21R, as are known in the art. In some embodiments, two or more STAT-activation domains are, or are derived from two or more different receptors. In some embodiments, the constitutively active signaling pathways include activation of a TRAF pathway through activation of TNF receptor associated factors such as TRAF3, TRAF4, TRAF7, and in illustrative embodiments TRAF1, TRAF2, TRAF5, and/or TRAF6. Thus, in certain embodiments, lymphoproliferative elements for use in any of the kits, methods, uses, or compositions herein, are constitutively active and comprise an intracellular signaling domain that activates a Jak/Stat pathway and/or a TRAF pathway. In some embodiments, the constitutively active signaling pathways include activation of PI3K pathways. In some embodiments, the constitutively active signaling pathways include activation of PLC pathways. Thus, in certain embodiments, lymphoproliferative elements for use in any of the kits, methods, uses, or compositions herein, are constitutively active and comprise an intracellular signaling domain that activates a Jak/Stat pathway a TRAF pathway, a PI3K pathway, and/or a PLC pathway. As illustrated therein, where there is a first and a second intracellular signaling domain of a CLE, the first intracellular signaling domain is positioned between the membrane associating motif, for example, a transmembrane domain, and the second intracellular domain.

[0450] In some embodiments, the lymphoproliferative elements provided herein include one or more, or all of the binding domains, including those disclosed herein, responsible for signaling found in the corresponding lymphoproliferative element in nature. In some embodiments, the lymphoproliferative elements provided herein include one or more JAK binding domains. In some embodiments, the JAK-binding domain is, or is derived from, EPOR, GP130, PRLR, GHR, GCSFR, or TPOR/MPLR. JAK-binding domains from these proteins are known in the art and a skilled artisan will understand how to use them. For example, residues 273-338 of EpoR and residues 478-582 of TpoR are known to be JAK-binding domains. Conserved motifs that are found in intracellular domains of cytokine receptors that are responsible for this signaling are known and are present in certain illustrative lymphoproliferative elements provided herein (see e.g., Morris et al., “The molecular details of cytokine signaling via the JAK/STAT pathway,” Protein Science (2018) 27:1984-2009). The Box1 and Box2 motifs are involved in binding to JAKs and signal transduction, although the Box2 motif presence is not always required for a proliferative signal (Murakami et al. Proc Natl Acad Sci U S A. 1991 Dec 15; 88(24):11349-53; Fukunaga et al. EMBO J. 1991 Oct; 10(10):2855-65; and O’Neal and Lee. Lymphokine Cytokine Res. 1993 Oct; 12(5):309-12). Accordingly, in some embodiments a lymphoproliferative element herein is a transgenic Box1-containing cytokine receptor that includes an intracellular domain of a cytokine receptor comprising a Box1 Janus kinase (JAK)-binding motif, optionally a Box2 JAK-binding motif, and a Signal Transducer and Activator of Transcription (STAT) binding motif comprising a tyrosine residue. In some embodiments, a lymphoproliferative element includes two or more JAK-binding motifs, for example three or more or four or more JAK-binding motifs, which in illustrative are the binding motifs found in natural versions of the corresponding lymphoproliferative element. In some embodiments, a lymphoproliferative element comprises an intracellular domain that is a means for transmitting a signal that promotes proliferation of a T cell and/or NK cell when part of a dimerized lymphoproliferative element

[0451] Intracellular domains from IFNAR1, IFNGR1, IFNLR1, IL2RB, IL4R, IL5RB, IL6R, IL6ST, IL7RA, IL9R, IL10RA, IL21R, IL27R, IL31RA, LIFR, and OSMR are known in the art to activate JAK1 signaling and thus comprise a JAK1 binding motif. Intracellular domains from CRLF2, CSF2RA, CSF2RB, CSF3R, EPOR, GHR, IFNGR2, IL3RA, IL5RA, IL6ST, IL20RA, IL20RB, IL23R, IL27R, LEPR, MPL, and PRLR are known in the art to activate JAK2 and thus comprise a JAK2 binding motif. Intracellular domains from IL2RG are known in the art to activate JAK3 and thus comprise a JAK3 binding motif. Intracellular domains from GHR, IFNAR1, IFNAR2, IFNGR1, IFNGR2, IL2RB, IL2RG, IL4R, IL5RA, IL5RB, IL7RA, IL9R, IL21R, IL22RA1, IL31RA, LIFR, MPL, and OSMR are known in the art to activate STAT1. Intracellular domains from IFNAR1 and IFNAR2 are known in the art to activate STAT2. Intracellular domains from GHR, IL2RB, IL2RG, IL6R, IL7RA, IL9R, IL10RA, IL10RB, IL21R, IL22RA1, IL23R, IL27R, IL31RA, LEPR, LIFR, MPL, and OSMR are known in the art to activate STAT3. Intracellular domains from IL12RB1 are known in the art to activate STAT4. Intracellular domains from CSF2RA, CSF2RB, CSF3R, EPOR, GHR, IL2RB, IL2RG, IL3RA, IL4R, IL5RA, IL5RB, IL7RA, IL9R, IL15RA, IL20RA, IL20RB, IL21R, IL22RA1, IL31RA, LIFR, MPL, OSMR, and PRLR are known in the art to activate STAT5. Intracellular domains from IL4R and OSMR are known in the art to activate STAT6. The genes and intracellular domains thereof that are found in a first intracellular domain are the same as the optional second intracellular domain, except that if the first and second intracellular domain are identical, then at least one, and typically both the transmembrane domain and the extracellular domain are not from the same gene.

[0452] In some embodiments, a lymphoproliferative element herein can include one or more intracellular signaling domains that include one or more Box1 motifs. In some embodiments, the one or more intracellular signaling domains that include one or more Box1 motifs can be IL7RA (Box1 motif at residues 9-17 of SEQ ID NOs:248 and 249), IL12RB ((Box1 motifs at residues 10-12 of SEQ ID NOs:254 and 255; and residues 107-110 and 139-142 of SEQ ID NO:256), IL31RA (Box1 motifs at residues 12-15 of SEQ ID NOs:275 and 276), CSF2RB (Box1 motif at residues 14-22 of SEQ ID NO:213), IL2RB (Box1 motif at residues 13-21 of SEQ ID NO:240), IL6ST (Box1 motif at residues 10-18 of SEQ ID NO:247), IL2RG (Box 1 motif at residues 3-11 of SEQ ID NO:241), IL27RA (Box1 motif at residues 17-25 of SEQ ID NO:273), MPL (Box1 motif at residues 17-20 of SEQ ID NO:283), OSMR (Box1 motif at residues 16-30 of SEQ ID NO:294), IFNAR2 (Box1 motif at residues 23-31 of SEQ ID NO:227), CSF3R, or EPOR (Box1 motif at residues 257-264 of full-length EPOR).

[0453] In some embodiments, a lymphoproliferative element herein can include one or more intracellular signaling domains that include one or more Box2 motifs. In some embodiments, the one or more intracellular signaling domains that include one or more Box2 motifs can be MPL (Box2 motif at residues 46-64 in SEQ ID NO:283), IFNAR2 (Box1 motif at residues 37-46 of SEQ ID NO:227), CSF3R, or EPOR (Box2 motif at residues 303-313 of full-length EPOR). EPOR also contains an extended Box2 motif (residues 329-372 of full-length EPOR) important for binding tyrosine kinase receptor KIT, which, in some embodiments, a lymphoproliferative element can include. CSF3R also contains a Box3 motif, which, in some embodiments, a lymphoproliferative element can include.

[0454] Some intracellular signaling domains have hydrophobic residues at positions -1, -2, and -6 relative to the Box1 motif, that form a “switch motif,” which is required for cytokine-induced JAK2 activation but not for JAK2 binding (Constantinescu et al. Mol Cell. 2001 Feb; 7(2):377-85; and Huang et al. Mol Cell. 2001 Dec; 8(6):1327-38). Accordingly, in certain embodiments, the Box1 motif-containing lymphoproliferative element has a switch motif, which in illustrative embodiments has one or more, and preferably all hydrophobic residues at positions -1, -2, and -6 relative to the Box1 motif. In certain embodiments, the Box1 motif an ICD of a lymphoproliferative element is located proximal to the transmembrane (TM) domain (for example between 5 and 15 or about 10 residues downstream from the TM domain) relative to the Box2 motif, which is located proximal to the transmembrane domain (for example between 10 and 50 residues downstream from the TM domain) relative to the STAT binding motif. The STAT binding motif typically comprising a tyrosine residue, the phosphorylation of which affects binding of a STAT to the STAT binding motif of the lymphoproliferative element. In some embodiments, the ICDs comprising multiple STAT binding motifs where multiple STAT binding motifs are present in a native ICD (e.g., EPO receptor and IL-6 receptor signaling chain (gp130). In some embodiments, the switch motif containing intracellular signaling domain can be MPL (switch motif at residues 11, 15, and 16 of SEQ ID NO:283).

[0455] In some embodiments, a lymphoproliferative element herein can include one or more intracellular signaling domains that include one or more phosphorylatable residues, for example, a phosphorylatable serine, threonine, or tyrosine. In some embodiments, the one or more intracellular signaling domains that include one or more phosphorylatable residues can be IL31RA (phosphorylatable tyrosines at residues Y96, Y237, and Y165 of SEQ ID NO:275; not present in SEQ ID NO:276), CD27 (phosphorylatable serine at residue S6 of SEQ ID NO:205), CSF2RB (phosphorylatable tyrosine at residue Y306 of SEQ ID NO:213), IL6ST (phosphorylatable serines at residues S20, S26, S141, S148, S188, and S198 of SEQ ID NO:247), MPL (phosphorylatable tyrosines at residues Y8, Y29, Y78, Y113, and Y118 of SEQ ID NO: 283), CD79B (phosphorylatable tyrosines at residues Y16 and Y27 of SEQ ID NO: 211), OSMR (phosphorylatable serines at residues S65 and S128 of SEQ ID NO:294), or CD3G (phosphorylatable serines at residues S123 and S126 of full-length CD3G). In some embodiments, a lymphoproliferative element that includes a CSF3R intracellular domain can include one, two, three, or all of the tyrosine residues corresponding to Y704, Y729, Y744, and Y764 of full-length CSF3R, various combinations of which have been shown to be important for binding Stat3, SOCS3, Grb2, and p21Ras. In some embodiments, a lymphoproliferative element herein can include one or more intracellular signaling domains that has one or more of its phosphorylatable residues mutated to a phosphomimetic residue, for example, aspartic acid or glutamic acid. In some embodiments, a lymphoproliferative element herein can include one or more intracellular signaling domains that has one or more of its phosphorylatable tyrosines mutated to a non-phosphorylatable residue, for example, alanine, valine, or phenylalanine. In some embodiments, a lymphoproliferative element that includes a CSF3R intracellular domain can include one or more mutations corresponding to T615A and T618I of full-length CSF3R, which have been shown to increase receptor dimerization and activity.

[0456] In some embodiments, a lymphoproliferative element herein can include one or more intracellular signaling domains that include one or more ubiquitination targeting motif residues. In some embodiments, the one or more intracellular signaling domains that include one or more ubiquitination targeting motif residues can be MPL (residues at K40 and K60 of SEQ ID NO:283) or OX40 (residues at K17 and K41 of SEQ ID NO:296). In some embodiments herein, an intracellular domain including ubiquitination targeting motif residues can have one or more of the lysines mutated to arginine or another amino acid.

[0457] In some embodiments, a lymphoproliferative element herein can include one or more intracellular signaling domains that include one or more TRAF binding sites. Not to be limited by theory, TRAF1, TRAF2, and TRAF3 binding sites include the amino acid sequence PXQXT (SEQ ID NO:303), where each X can be any amino acid, a distinct TRAF2 binding site includes the consensus sequence SXXE (SEQ ID NO:304) where each X can be any amino acid, and a TRAF6 binding site includes the consensus sequence QXPXEX (SEQ ID NO:305). In some embodiments, the one or more intracellular signaling domains that include one or more TRAF binding sites can be CD40 (binding sites for TRAF1, TRAF2, and TRAF3 at residues 35-39 of SEQ ID NO:208; TRAF2 binding site at residues 57-60 of SEQ ID NO:208; TRAF6 binding site at residues 16-21 of SEQ ID NO:208), or OX40 (TRAF1, TRAF2, TRAF3, and TRAF5 binding motif at residues 20-27 of SEQ ID NO:296).

[0458] In some embodiments, a lymphoproliferative element herein can include one or more intracellular signaling domains that include a TIR domain. In some embodiments, the one or more intracellular signaling domains that include a TIR domains can be IL17RE (TIR domain at residues 13-136 of SEQ ID NO:265), IL18R1 (TIR domain at residues 28-170 of SEQ ID NO:266), or MyD88 (TIR domain at residues 160-304 of SEQ ID NO:284).

[0459] In some embodiments, a lymphoproliferative element herein can include one or more intracellular signaling domains that include a PI3K binding motif domain. In some embodiments, the one or more intracellular signaling domains that include a PI3K binding motif can be CD28 (PI3K binding motifs at residues 12-15 of SEQ ID NOs:206 and 207, which also binds Grb2), ICOS (PI3K binding motif at residues 19-22 of SEQ ID NO:225, which can be mutated F21Q to increase IL-2 production and/or to bind Grb2), OX40 (p85 PI3K binding motif at residues 34-57 of full-length OX40)

[0460] In some embodiments, a lymphoproliferative element herein can include one or more intracellular signaling domains that include a dileucine motif. In some embodiments, the one or more intracellular signaling domains that include a dileucine motif can be IFNGR2 (dileucine motif at residues 8-9 of SEQ ID NO:230) or CD3G (dileucine motif at residues 131-132 of full-length CD3G). In some embodiments, one or both of the residues in the dileucine motif can be mutated.

[0461] In some embodiments, a lymphoproliferative element herein can include one or more intracellular signaling domains that include one or more N-terminal death domains. In some embodiments, the one or more intracellular signaling domains that include one or more N-terminal death domains can be MyD88 (N-terminal death domain at residues 29-106 of SEQ ID NO:284) or a TNFR. The cytoplasmic domains of TNF receptors (TNFRs), which in illustrative embodiments can be TNFRSF4, TNFRSF8, TNFRSF9, TNFRSF14, or TNFRSF18, can recruit signaling molecules, including TRAFs (TNF receptor-associated factors) and/or “death domain” (DD) molecules. The domains, motifs, and point mutations of TNFRs that induce proliferation and/or survival of T cells and/or NK cells are known in the art and a skilled artisan can identify corresponding domains, motifs, and point mutations in TNFR polypeptides. A skilled artisan will be able to identify the TRAF- and/or DD-binding motif in the different TNFR families using, for example, sequence alignments to known binding motifs. In some embodiments, a lymphoproliferative element that includes a TNFR intracellular domain can include one or more TRAF-binding motifs. In some embodiments, a lymphoproliferative element that includes a TNFR intracellular domain does not include a DD-binding motif, or has one or more DD-binding motifs deleted or mutated within the intracellular domain. In some embodiments, a lymphoproliferative element that includes a TNFR intracellular domain can recruit TRADD and/or TRAF2. TNFRs also include cysteine-rich domains (CRDs) that are important for ligand binding (Locksley RM et al. Cell. 2001 Feb 23;104(4):487-501). In some embodiments, a lymphoproliferative element that includes a TNFR intracellular domain does not include a TNFR CRD.

[0462] In some embodiments, a lymphoproliferative element herein can include one or more intracellular signaling domains that include one or more intermediate domains that interact with IL-1R associated kinase. In some embodiments, the one or more intracellular signaling domains that include one or more intermediate domains can be MyD88 (intermediate domain at residues 107-156 of SEQ ID NO:284),

[0463] In some embodiments, a lymphoproliferative element that includes an intracellular domain from IL7RA can include one or more of the S region or T region (S region at residues 359-394 and T region at residues Y401, Y449, and Y456 of full-length IL7RA). In illustrative embodiments of lymphoproliferative elements that include a first intracellular domain derived from IL7RA, the second intracellular domain can be derived from TNFRSF8.

[0464] In illustrative embodiments of lymphoproliferative elements that include a first intracellular domain derived from CD40, the second intracellular domain can be other than an intracellular domain derived from MyD88, a CD28 family member (e.g., CD28, ICOS), Pattern Recognition Receptor, a C-reactive protein receptor (i.e., Nodi, Nod2, PtX3-R), a TNF receptor, CD40, RANK/TRANCE-R, OX40, 4-1BB), an HSP receptor (Lox-1 and CD91), or CD28. Pattern Recognition Receptors include, but are not limited to endocytic pattern-recognition receptors (i.e., mannose receptors, scavenger receptors (i.e., Mac-1, LRP, peptidoglycan, teichoic acids, toxins, CD1 1 c/CR4)); external signal pattern-recognition receptors (Toll-like receptors (TLR1, TLR2, TLR3, TLR4, TLR5, TLR6, TLR7, TLR8, TLR9, TLR10), peptidoglycan recognition protein, (PGRPs bind bacterial peptidoglycan, and CD14); internal signal pattern-recognition receptors (i.e., NOD-receptors 1 & 2), and RIG1.

[0465] In some embodiments, a lymphoproliferative element that includes an intracellular domain from MyD88 can include one or more of the mutations L93P, R193C, and L265P in full-length MyD88 (mutations L93P, R196C, and L260P of SEQ ID NO:284). In illustrative embodiments of lymphoproliferative elements that include a first intracellular domain derived from MyD88, the second intracellular domain can be derived from TNFRSF4 or TNFRSF8. In other illustrative embodiments of lymphoproliferative elements that include a first intracellular domain derived from MyD88, the second intracellular domain can be other than an intracellular domain derived from a CD28 family member (e.g., CD28, ICOS), Pattern Recognition Receptor, a C-reactive protein receptor, a TNF receptor, or an HSP receptor.

[0466] In some embodiments, a cell expressing the lymphoproliferative element comprising an intracellular and transmembrane domain of MPL can be contacted with or exposed to eltrombopag, or a patient or subject to which such a cell has been infused can be treated with eltrombopag. Not to be limited by theory, eltrombopag binds to the transmembrane domain of MPL and induces the activation of the intracellular domain of MPL.

[0467] The domains, motifs, and point mutations of MPL that induce proliferation and/or survival of T cells and/or NK cells are known in the art and a skilled artisan can identify corresponding domains, motifs, and point mutations in MPL polypeptides, some of which are discussed in this paragraph. Deletion of the region encompassing amino acids 70-95 in SEQ ID NO:283 was shown to support viral transformation in the context of v-mpl (Benit et al. J Virol. 1994 Aug; 68(8):5270-4), thus indicating that this region is not necessary for the function of mpl in this context. Morello et al. Blood 1995 July; 86(8):557-71 used the same deletion to show that this region was not required for stimulating transcription for a hematopoietin receptor-responsive CAT reporter gene construct and furthermore saw that this deletion resulted in slightly enhanced transcription expected for removal of a nonessential and negative element in this region as suggested by Drachman and Kaushansky. Thus, in some embodiments, a MPL intracellular signaling domain does not comprise the region comprising amino acids 70-95 in SEQ ID NO:283. Using computer simulations, Lee et al. found clinically relevant mutations in the transmembrane domain of MPL should activate MPL with the following order of activating effects: W515K (corresponding to the amino acid substitution W2K of SEQ ID NO: 283) > S505A (corresponding to the amino acid substitution S14A of SEQ ID NO:187) > W515I (corresponding to the amino acid substitution W2I of SEQ ID NO: 283) > S505N (corresponding to the amino acid substitution S14N of SEQ ID NO:187, which was tested as part T075 (SEQ ID NO:188)) (Lee et. al. PLoS One. 2011; 6(8): e23396). The simulations predicted these mutations could cause constitutive activation of JAK2, the kinase partner of MPL. In some embodiments, the intracellular portion of MPL can include one or more, or all the domains and motifs described herein that are present in SEQ ID NO: 283. In some embodiments, a transmembrane portion of MPL can include one or more, or all the domains and motifs described herein that are present in SEQ ID NO:187. In illustrative embodiments of lymphoproliferative elements that include a first intracellular domain derived from MPL, the second intracellular domain can be derived from CD79B.

[0468] In illustrative embodiments of lymphoproliferative elements that include a second intracellular domain derived from CD79B, the first intracellular domain can be derived from CSF3R.

[0469] In some embodiments, a lymphoproliferative element that includes an PRLR intracellular domain can include the growth hormone receptor binding domain of PRLR and any known mutations (growth hormone receptor binding domain at residues 28-104 of SEQ ID NO:295).

[0470] In some embodiments, a lymphoproliferative element that includes an ICOS intracellular domain can include a calcium-signaling motif (calcium-signaling motif at residues 5-8 of SEQ ID NO:225). In some embodiments, a lymphoproliferative element that includes an ICOS intracellular domain can include at least one of a first and second conserved motif (first and second conserved motifs at residues 9-18 and 24-30, respectively, of SEQ ID NO:225). In some embodiments, a lymphoproliferative element that includes an ICOS intracellular domain does not include at least one of the first and second conserved motif.

[0471] EPOR also contains a short segment important for EPOR internalization (residues 267-276 of full-length EPOR). In some embodiments, a lymphoproliferative element that includes an EPOR intracellular domain does not include the internalization segment.

[0472] The domains, motifs, and point mutations of intracellular signaling domains that induce proliferation and/or survival of T cells and/or NK cells are known in the art and a skilled artisan can identify corresponding domains, motifs, and point mutations in polypeptides, some of which are above, and a skilled artisan can identify corresponding domains, motifs, and point mutations in other polypeptides. A skilled artisan will be able to identify these domains, motifs, and point mutations in similar polypeptides using, for example, sequence alignments to known binding motifs. In some embodiments, a lymphoproliferative element herein can include any, for example, one or more up to all of the domains, motifs, and mutations of a intracellular signaling domain disclosed herein or otherwise known to induce proliferation and/or survival of T cells and/or NK cells.

[0473] In another embodiment, the LE provides, is capable of providing and/or possesses the property of (or a cell modified, genetically modified, and/or transduced with the LE is capable of providing, is adapted for, possesses the property of, and/or is modified for) driving T cell expansion in vivo.

[0474] In some embodiments, the lymphoproliferative element can include any of the sequences listed in Table 1 (SEQ ID NOs: 84-302). Table 1 shows the parts, names (including gene names), and amino acid sequences for domains that were tested in CLEs. CLEs can include in certain illustrative embodiments, an extracellular domain (denoted P1), a transmembrane domain (denoted P2), a first intracellular domain (denoted P3), and a second intracellular domain (denoted P4). Typically, the lymphoproliferative element includes a first intracellular domain. In illustrative embodiments, the first intracellular domain can include any of the parts listed as S036 to S0216 or in Table 1, or functional mutants and/or fragments thereof. In some embodiments, the lymphoproliferative element can include a second intracellular domain. In illustrative embodiments, the second intracellular domain can include any of the parts listed as S036 to S0216 or in Table 1, or functional mutants and/or fragments thereof. In some embodiments, the lymphoproliferative element can include an extracellular domain. In illustrative embodiments, the extracellular domain can include any of the sequences of parts listed as M001 to M049 or E006 to E015 in Table 1, or functional mutants and/or fragments thereof. In some embodiments, the lymphoproliferative element can include a transmembrane domain. In illustrative embodiments, the transmembrane domain can include any of the parts listed as M001 to M049 or T001 to T082 in Table 1, or functional mutants and/or fragments thereof. In some embodiments, the lymphoproliferative element can be a fusion of an extracellular/transmembrane domain (M001 to M049 in Table 1), a first intracellular domain (S036 to S0216 in Table 1), and a second intracellular domain (S036 to S216 in Table 1). In some embodiments, the lymphoproliferative element can be a fusion of an extracellular domain (E006 to E016 in Table 1), a transmembrane domain (T001 to T082 in Table 1), a first intracellular domain (S036 to S0216 in Table 1), and a second intracellular domain (S036 to S0216 in Table 1). For example, the lymphoproliferative element can be a fusion of E006, T001, S036, and S216, also written as E006-T001-S036-S216). In illustrative embodiments, the lymphoproliferative element can be the fusion E010-T072-S192-S212, E007-T054-S197-S212, E006-T006-S194-S211, E009-T073-S062-S053, E008-T001-S121-S212, E006-T044-S186-S053, or E006-T016-S186-S050.

[0475] In illustrative embodiments, the intracellular domain of an LE, or the first intracellular domain in an LE that has two or more intracellular domains, is other than a functional intracellular activating domain from an ITAM-containing intracellular domain, for example, an intracellular domain from CD3Z, CD3D, CD3E, CD3G, CD79A, CD79B, DAP12, FCER1G, FCGR2A, FCGR2C, DAP10/CD28, or ZAP70, and in a further illustrative subembodiment, CD3z. In illustrative embodiments, the extracellular domain of an LE does not comprise a single-chain variable fragment (scFv). In further illustrative embodiments, the extracellular domain of an LE that upon binding to a binding partner activates an LE, does not comprise a single-chain variable fragment (scFv). A CLE does not comprise both an ASTR and an activation domain from CD3Z, CD3D, CD3E, CD3G, CD79A, CD79B, DAP12, FCER1G, FCGR2A, FCGR2C, DAP10/CD28, or ZAP70. If an LE does include an ASTR (and not an activation domain in the previous list), the ASTR of an LE in illustrative embodiments does not include an scFv. In some embodiments, a lymphoproliferative element does not include an extracellular domain.

[0476] In some embodiments, the lymphoproliferative element, and in illustrative embodiments CLE, is not covalently attached to a cytokine. In some aspects, a lymphoproliferative element, and in illustrative embodiments CLE, comprises a cytokine polypeptide covalently linked to its cognate receptor. In either of these embodiments, the CLE can be constitutively active and typically constitutively activates the same Jak/STAT and/or TRAF pathways as the corresponding activated wild-type cytokine receptor. In some embodiments, the chimeric cytokine receptor is an interleukin. In some embodiments, the CLE is IL-7 covalently linked to IL7RA or IL-15 covalently linked to IL15RA. In other embodiments, the CLE is other than IL-15 covalently linked to IL15RA. In other aspects, the CLE comprises a cytokine polypeptide covalently linked to only a portion of its cognate receptor that includes a functional portion of the extracellular domain capable of binding the cytokine polypeptide, the transmembrane domain and/or intracellular domain are from heterologous polypeptides, and the CLE is constitutively active. In one embodiment, the CLE is IL-7 covalently linked to the extracellular and transmembrane domains of IL7RA, and the intracellular domain from IL2RB. In another embodiment, the CLE is a cytokine polypeptide covalently linked to a portion of its cognate receptor that includes a functional portion of the extracellular domain capable of binding the cytokine polypeptide, a heterologous transmembrane domain, and lymphoproliferative element intracellular domain provided herein. In some embodiments, the lymphoproliferative element is a cytokine receptor that is not tethered to a cytokine.

[0477] In some aspects, the lymphoproliferative element is capable of binding to soluble cytokines or growth factors and such binding is required for activity. In certain illustrative embodiments, the lymphoproliferative element is constitutively active, and thus does not require binding to a soluble growth factor or cytokine for activity. Typically, constitutively active lymphoproliferative elements do not bind soluble cytokines or growth factors. In some embodiments, the lymphoproliferative element is a chimera comprising an extracellular binding domain from one receptor and the intracellular signaling domain from a different receptor. In some embodiments the CLE is an inverted receptor that is activated upon binding of a ligand that would inhibit proliferation and/or survival when bound to its natural receptor, but instead leads to proliferation and/or survival upon activating the CLE. In some embodiments, inverted receptors include chimeras that comprise an extracellular ligand binding domain from IL4Ra and an intracellular domain from IL7Ra or IL21. Other embodiments of inverted cytokine receptors include chimeras that comprise an extracellular ligand binding domain from a receptor that would inhibit proliferation and/or survival when bound to its natural ligand, such as receptors for IL-4, IL-10, IL-13, or TGFb, and any lymphoproliferative element intracellular domain disclosed herein. In illustrative aspects, the lymphoproliferative element does not bind a cytokine. In further illustrative aspects, the lymphoproliferative element does not bind any ligand. In illustrative embodiments, the lymphoproliferative elements that do not bind any ligand are constitutively dimerized or otherwise multimerized, and are constitutively active. In illustrative embodiments of any of the methods and compositions provided herein that include a lymphoproliferative element, the intracellular domain can be derived from an intracellular portion of the transmembrane protein of the TNF receptor family, CD40. The domains, motifs, and point mutations of CD40 that induce proliferation and/or survival of T cells and/or NK cells are known in the art and a skilled artisan can identify corresponding domains, motifs, and point mutations in CD40 polypeptides, some of which are discussed in this paragraph. The CD40 protein contains several binding sites for TRAF proteins. Not to be limited by theory, binding sites for TRAF1, TRAF2, and TRAF3 are located at the membrane distal domain of the intracellular portion of CD40 and include the amino acid sequence PXQXT (SEQ ID NO:303) where each X can be any amino acid, (corresponding to amino acids 35-39 of SEQ ID NO:208) (Elgueta et al. Immunol Rev. 2009 May; 229(1):152-72). TRAF2 has also been shown to bind to the consensus sequence SXXE (SEQ ID NO:304) where each X can be any amino acid, (corresponding to amino acids 57-60 of SEQ ID NO:208) (Elgueta et al. Immunol Rev. 2009 May; 229(1):152-72). A distinct binding site for TRAF6 is situated at the membrane proximal domain of intracellular portion of CD40 and includes the consensus sequence QXPXEX (SEQ ID NO:305) where each X can be any amino acid (corresponding to amino acids 16-21 of SEQ ID NO:208) (Lu et al. J Biol Chem. 2003 Nov 14; 278(46):45414-8). In illustrative embodiments, the intracellular portion of the transmembrane protein CD40 can include all the binding sites for the TRAF proteins. The TRAF binding sites are known in the art and a skilled artisan will be able to identify corresponding TRAF binding sites in similar CD40 polypeptides. In some embodiments, a suitable intracellular domain can include a domain with at least 50%, 60%, 70%, 75%, 80%, 85%, 90%, 95%, 96%, 97%, 98%, 99% or 100% sequence identity to a stretch of at least 10, 15, 20, or all of the amino acids in SEQ ID NO:208 or SEQ ID NO:209. In some embodiments, the intracellular domain derived from CD40 has a length of from about 30 amino acids (aa) to about 35 aa, from about 35 aa to about 40 aa, from about 40 aa to about 45 aa, from about 45 aa to about 50 aa, from about 50 aa to about 55 aa, from about 55 aa to about 60 aa, or from about 60 aa to about 65 aa. In illustrative embodiments, the intracellular domain derived from CD40 has a length of from about 30 aa to about 66 aa, for example, 30 aa to 65 aa, or 50 aa to 66 aa. In illustrative embodiments of lymphoproliferative elements that include a first intracellular domain derived from CD40, the second intracellular domain can be other than an intracellular domain derived from MyD88, a CD28 family member (e.g., CD28, ICOS), Pattern Recognition Receptor, a C-reactive protein receptor (i.e., Nodi, Nod2, PtX3-R), a TNF receptor, CD40, RANK/TRANCE-R, OX40, 4-1BB), an HSP receptor (Lox-1 and CD91), or CD28. Pattern Recognition Receptors include, but are not limited to endocytic pattern-recognition receptors (i.e., mannose receptors, scavenger receptors (i.e., Mac-1, LRP, peptidoglycan, teichoic acids, toxins, CD1 1 c/CR4)); external signal pattern-recognition receptors (Toll-like receptors (TLR1, TLR2, TLR3, TLR4, TLR5, TLR6, TLR7, TLR8, TLR9, TLR10), peptidoglycan recognition protein, (PGRPs bind bacterial peptidoglycan, and CD14); internal signal pattern-recognition receptors (i.e., NOD-receptors 1 & 2), and RIG1.

[0478] In illustrative embodiments of any of the methods and compositions provided herein that include a lymphoproliferative element, the intracellular domain can be derived from a portion of the transmembrane protein MPL. Accordingly, in some embodiments, the lymphoproliferative element comprises MPL, or is MPL, or a variant and/or fragment thereof, including a variant and/or fragment that includes at least 75, 80, 85, 90, 95, 96, 97, 98, 99, or 100% of the intracellular domain of MPL, with or without a transmembrane and/or extracellular domain of MPL, wherein the variant and/or fragment retains the ability to promote cell proliferation of PBMCs, and in some embodiments T cells. In some embodiments, a cell expressing the lymphoproliferative element comprising an intracellular and transmembrane domain of MPL can be contacted with, exposed to, or treated with eltrombopag. Not to be limited by theory, eltrombopag binds to the transmembrane domain of MPL and induces the activation of the intracellular domain of MPL. The domains, motifs, and point mutations of MPL that induce proliferation and/or survival of T cells and/or NK cells are known in the art and a skilled artisan can identify corresponding domains, motifs, and point mutations in MPL polypeptides, some of which are discussed in this paragraph. The transmembrane MPL protein contains the Box1 motif PXXP (SEQ ID NO:306) where each X can be any amino acid (corresponding to amino acids 17-20 in SEQ ID NO:283) and the Box2 motif, a region with increased serine and glutamic acid content (corresponding to amino acids 46-64 in SEQ ID NO:283) (Drachman and Kaushansky. Proc Natl Acad Sci U S A. 1997 Mar 18; 94(6):2350-5). The Box1 and Box2 motifs are involved in binding to JAKs and signal transduction, although the Box2 motif presence is not always required for a proliferative signal (Murakami et al. Proc Natl Acad Sci U S A. 1991 Dec 15; 88(24):11349-53; Fukunaga et al. EMBO J. 1991 Oct; 10(10):2855-65; and O’Neal and Lee. Lymphokine Cytokine Res. 1993 Oct; 12(5):309-12). Many cytokine receptors have hydrophobic residues at positions -1, -2, and -6 relative to the Box1 motif (corresponding to amino acids 16, 15, and 11, respectively, of SEQ ID NO:283), that form a “switch motif,” which is required for cytokine-induced JAK2 activation but not for JAK2 binding (Constantinescu et al. Mol Cell. 2001 Feb; 7(2):377-85; and Huang et al. Mol Cell. 2001 Dec; 8(6):1327-38). Deletion of the region encompassing amino acids 70-95 in SEQ ID NO:283was shown to support viral transformation in the context of v-mpl (Benit et al. J Virol. 1994 Aug; 68(8):5270-4), thus indicating that this region is not necessary for the function of mpl in this context. Morello et al. Blood 1995 July; 86(8):557-71 used the same deletion to show that this region was not required for stimulating transcription for a hematopoietin receptor-responsive CAT reporter gene construct and furthermore saw that this deletion resulted in slightly enhanced transcription expected for removal of a nonessential and negative element in this region as suggested by Drachman and Kaushansky. Thus, in some embodiments, a MPL intracellular signaling domain does not comprise the region comprising amino acids 70-95 in SEQ ID NO:283. In full-length MPL, the lysines K553 (corresponding to K40 of SEQ ID NO: 283) and K573 (corresponding to K60 of SEQ ID NO: 283) have been shown to be negative regulatory sites that function as part of a ubiquitination targeting motif (Saur et al. Blood 2010 Feb 11;115(6):1254-63). Thus, in some embodiments herein, a MPL intracellular signaling domain does not comprise these ubiquitination targeting motif residues. In full-length MPL, the tyrosines Y521 (corresponding to Y8 of SEQ ID NO: 283), Y542 (corresponding to Y29 of SEQ ID NO:283), Y591 (corresponding to Y78 of SEQ ID NO: 283), Y626 (corresponding to Y113 of SEQ ID NO: 283), and Y631 (corresponding to Y118 of SEQ ID NO: 283) have been shown to be phosphorylated (Varghese et al. Front Endocrinol (Lausanne). 2017 Mar 31; 8:59). Y521 and Y591 of full-length MPL are negative regulatory sites that function either as part of a lysosomal targeting motif (Y521) or via an interaction with adaptor protein AP2 (Y591) (Drachman and Kaushansky. Proc Natl Acad Sci U S A. 1997 Mar 18; 94(6):2350-5; and Hitchcock et al. Blood. 2008 Sep 15; 112(6):2222-31). Y626 and Y631 of full-length MPL are positive regulatory sites (Drachman and Kaushansky. Proc Natl Acad Sci U S A. 1997 Mar 18; 94(6):2350-5) and the murine homolog of Y626 is required for cellular differentiation and the phosphorylation of Shc (Alexander et al. EMBO J. 1996 Dec 2;15(23):6531-40) and Y626 is also required for constitutive signaling in MPL with the W515A mutation described below (Pecquet et al. Blood. 2010 Feb 4;115(5):1037-48). MPL contains the Shc phosphotyrosine-binding binding motif NXXY (SEQ ID NO:307) where each X can be any amino acid (corresponding to amino acids 110-113 of SEQ ID NO: 283), and this tyrosine is phosphorylated and important for the TPO-dependent phosphorylation of Shc, SHIP, and STAT3 (Laminet et al. J Biol Chem. 1996 Jan 5; 271(1):264-9; and van der Geer et al. Proc Natl Acad Sci USA. 1996 Feb 6; 93(3):963-8). MPL also contains the STAT3 consensus binding sequence YXXQ (SEQ ID NO:308) where each X can be any amino acid (corresponding to amino acids 118-121 of SEQ ID NO: 283) (Stahl et al. Science. 1995 Mar 3; 267(5202):1349-53). The tyrosine of this sequence can be phosphorylated and MPL is capable of partial STAT3 recruitment (Drachman and Kaushansky. Proc Natl Acad Sci U S A. 1997 Mar 18; 94(6):2350-5). MPL also contains the sequence YLPL (SEQ ID NO: 309) (corresponding to amino acid 113-116 of SEQ ID NO: 283), which is similar to the consensus binding site for STAT5 recruitment pYLXL (SEQ ID NO:310) where pY is phosphotyrosine and X can be any amino acid (May et al. FEBS Lett. 1996 Sep 30; 394(2):221-6). Using computer simulations, Lee et al. found clinically relevant mutations in the transmembrane domain of MPL should activate MPL with the following order of activating effects: W515K (corresponding to the amino acid substitution W2K of SEQ ID NO: 283) > S505A (corresponding to the amino acid substitution S14A of SEQ ID NO:187) > W515I (corresponding to the amino acid substitution W2I of SEQ ID NO: 283) > S505N (corresponding to the amino acid substitution S14N of SEQ ID NO:187, which was tested as part T075 (SEQ ID NO:188)) (Lee et. a. PLoS One. 2011; 6(8): e23396). The simulations predicted these mutations could cause constitutive activation of JAK2, the kinase partner of MPL. In some embodiments, the intracellular portion of MPL can include one or more, or all the domains and motifs described herein that are present in SEQ ID NO 283. In some embodiments, a transmembrane portion of MPL can include one or more, or all the domains and motifs described herein that are present in SEQ ID N0:187. The domains, motifs, and point mutations of MPL provided herein are known in the art and a skilled artisan would recognize that MPL intracellular signaling domains herein in illustrative embodiments would include one or more corresponding domains, motifs, and point mutations in that have been shown to promote proliferative activity and would not include that that have been shown to inhibit MPLs proliferative activity. Any or all of these domains, motifs, and point mutations of MPL can be present in an intracellular signaling domain can be included in any of the aspects and embodiments disclosed herein. In some embodiments, a suitable intracellular domain can include a domain with at least 50%, 60%, 70%, 75%, 80%, 85%, 90%, 95%, 96%, 97%, 98%, 99% or 100% sequence identity to a stretch of at least 10, 15, 20, or all of the amino acids in SEQ ID NO:283. In some embodiments, the intracellular domain derived from MPL has a length of from about 30 aa to about 35 aa, from about 35 aa to about 40 aa, from about 40 aa to about 45 aa, from about 45 aa to about 50 aa, from about 50 aa to about 55 aa, from about 55 aa to about 60 aa, from about 60 aa to about 65 aa, from about 65 aa to about 70 aa, from about 70 aa to about 100 aa, from about 100 aa to about 125 aa, from about 125 aa to 150 aa, from about 150 to about 175 aa, from about 175 aa to about 200 aa, from about 200 aa to about 250 aa, from about 250 aa to 300 aa, from about 300 aa to 350 aa, from about 350 aa to about 400 aa, from about 400 aa to about 450 aa, from about 450 aa to about 500 aa, from about 500 aa to about 550 aa, from about 550 aa to about 600 aa, or from about 600 aa to about 635 aa. In illustrative embodiments, the intracellular domain derived from MPL has a length of from about 30 aa to about 200 aa, for example, 30 aa to 150 aa, 30 aa to 119 aa, 30 aa to 121 aa, 30 aa to 122 aa, or 50 aa to 125 aa. In illustrative embodiments of lymphoproliferative elements that include a first intracellular domain derived from MPL, the second intracellular domain can be derived from CD79B.

[0479] Lymphoproliferative elements and CLEs that can be included in any of the aspects disclosed herein, can be any of the LEs or CLEs disclosed in WO2019/055946. CLEs were disclosed therein that promoted proliferation in cell culture of PBMCs that were transduced with lentiviral particles encoding the CLEs between day 7 and day 21, 28, 35 and/or 42 after transduction. Furthermore, CLEs were identified therein, that promoted proliferation in vivo in mice in the presence or absence of an antigen recognized by a CAR, wherein T cells expressing one of the CLEs and the CAR were introduced into the mice. As exemplified therein, tests and/or criteria can be used to identify whether any test polypeptide, including LEs, or test domains of an LE, such as a first intracellular domain, or a second intracellular domain, or both a first and second intracellular domain, are indeed LEs or effective intracellular domains of LEs, or especially effective LEs or intracellular domains of LEs. Thus, in certain embodiments, any aspect or other embodiment provided herein that includes an LE or a polynucleotide or nucleic acid encoding an LE can recite that the LE meets, or provides the property of, or is capable of providing and/or possesses the property of, any one or more of the identified tests or criteria for identifying an LE provided herein, or that a cell genetically modified, transduced, and/or stably transfected with a recombinant nucleic acid vector, such as a cell that is transduced with a lentiviral particle encoding the LE, is capable of providing, is adapted for, possesses the property of, and/or is modified for achieving the results of one or more of the recited tests. In one embodiment, the LE provides, is capable of providing and/or possesses the property of, (or a cell genetically modified and/or transduced with a retroviral particle encoding the LE is capable of providing, is adapted for, possesses the property of, and/or is modified for) improved expansion to pre-activated PBMCs transduced with a lentivirus comprising a nucleic acid encoding the LE and an anti-CD19 CAR comprising a CD3 zeta intracellular activating domain but no co-stimulatory domain, between day 7 and day 21, 28, 35, and/or 42 of in vitro culturing post-transduction in the absence of exogenously added cytokines, compared to a control retroviral particle, e.g. lentiviral particle under identical conditions. In some embodiments, a lymphoproliferative element test for improved or enhanced survival, expansion, and/or proliferation of cells transduced with a retroviral particle (e.g. lentiviral particle) having a genome encoding a test construct encoding a putative LE (test cells) can be performed based on a comparison to control cells, which can be, for example, either untransduced cells or cells transduced with a control retroviral (e.g. lentiviral) particle identical to the lentiviral particle comprising the nucleic acid encoding the lymphoproliferative element, but lacking the lymphoproliferative element, or lacking the intracellular domain or domains of the test polypeptide construct but comprising the same extracellular domain, if present, and the same transmembrane region or membrane targeting region of the respective test polypeptide construct. In some embodiments control cells are transduced with a retroviral particle (e.g., lentiviral particle) having a genome encoding a lymphoproliferative element or intracellular domain(s) thereof, identified herein as exemplifying a lymphoproliferative element. In such an embodiment, the test criteria can include that there is at least as much enrichment, survival and/or expansion, or no statistical difference of enrichment, survival, and/or expansion when the test is performed using a retroviral particle (e.g., lentiviral particle) having a genome encoding a test construct versus encoding the control lymphoproliferative element, typically by analyzing cells transcribed therewith. Exemplary or illustrative embodiments of lymphoproliferative elements herein, in some embodiments, are illustrative embodiments of control lymphoproliferative elements for such a test.

[0480] In some embodiments, this test for an improved property of a putative or test lymphoproliferative element is performed by performing replicates and/or performing a statistical test. A skilled artisan will recognize that many statistical tests can be used for such a lymphoproliferative element test. Contemplated for such a test in these embodiments would be any such test known in the art. In some embodiments, the statistical test can be a T-test or a Mann-Whitney-Wilcoxon test. In some embodiments, the normalized enrichment level of a test construct is significant at a p-value of less than 0.1, or less than 0.05, or less than 0.01.

[0481] In another embodiment, the LE provides, is capable of providing and/or possesses the property of (or a cell genetically modified and/or transduced with the LE is capable of providing, is adapted for, possesses the property of, and/or is modified for) at least a 1.5-fold, 2-fold, 3-fold, 4-fold, 5-fold, 6-fold, 7-fold, 8-fold, 9-fold, or 10-fold expansion, or between 1.5 fold and 25-fold expansion, or between 2-fold and 20-fold expansion, or between 2-fold and 15-fold expansion, or between 5-fold and 25-fold expansion, or between 5-fold and 20-fold expansion, or between 5-fold and 15-fold expansion, of pre-activated PBMCs transduced with a nucleic acid encoding the LE when transduced along with an anti-CD19 CAR comprising a CD3 zeta intracellular activating domain but no co-stimulatory domain, between day 7 and day 21, 28, 35, and/or 42 of in vitro culturing in the absence of exogenously added cytokines. In some embodiments, the test is performed in the presence of PBMCs, for example at a 1:1 ratio of transduced cells to PBMCs, which can be for example, from a matched donor, and in some embodiments, the test is performed in the absence of PBMCs. In some embodiments, the analysis of expansion for any of these tests is performed as illustrated in WO2019/055946. In some embodiments, the test can include a further statistical test and a cut-off such as a P value below 0.1, 0.05, or 0.01, wherein a test polypeptide or nucleic acid encoding the same, needs to meet one or both thresholds (i.e., fold expansion and statistical cutoff).

[0482] For any of the lymphoproliferative element tests provided herein, the number of test cells and the number of control cells can be compared between day 7 and day 14, 21, 28, 35, 42 or 60 post-transduction. In some embodiments, the numbers of test and control cells can be determined by sequencing DNA and counting the occurrences of unique identifiers present in each construct. In some embodiments, the numbers of test and control cells can be counted directly, for example with a hemocytometer or a cell counter. In some embodiments, all the test cells and control cells can be grown within the same vessel, well or flask. In some embodiments, the test cells can be seeded in one or more wells, flasks or vessels, and the control cells can be seeded in one or more flasks or vessels. In some embodiments, test and control cells can be seeded individually into wells or flasks, e.g., one cell per well. In some embodiments, the numbers of test cells and control cells can be compared using enrichment levels. In some embodiments, the enrichment level for a test or control construct can be calculated by dividing the number of cells at a later time point (day 14, 21, 28, 35, or day 45) by the number of cells at day 7 for each construct. In some embodiments, the enrichment level for a test or control construct can be calculated by dividing the number of cells at a time point (day 14, 21, 28, 35, or day 45) by the number of cells at that time point for untransduced cells. In some embodiments, the enrichment level of each test construct can be normalized to the enrichment level of the respective control construct to generate a normalized enrichment level. In some embodiments, a LE encoded in the test construct provides (or a cell genetically modified and/or transduced with a retroviral particle (e.g. lentiviral particle) having a genome encoding the LE is capable of providing, is adapted for, possesses the property of, and/or is modified for) at least a 1.5-fold, 2-fold, 3-fold, 4-fold, 5-fold, 6-fold, 7-fold, 8-fold, 9-fold, or 10-fold normalized enrichment level, or between 1.5 fold and 25-fold normalized enrichment level, or between 3-fold and 20-fold normalized enrichment level, or between 5-fold and 25-fold normalized enrichment level, or between 5-fold and 20-fold normalized enrichment level, or between 5-fold and 15-fold normalized enrichment level. Enrichment can be measured, for example, by direct cell counting. Cutoff values can be based on a single test, or two, three, four, or five repeats, or based on many repeats. The cutoff can be met when a lymphoproliferative element meets one or more repeat tests, or meets or exceeds a cutoff for all repeats. In some embodiments, the enrichment is measured as log₂((normalized count data on the test day + 1)/(normalized count data on day 7 + 1)).

[0483] Additional details regarding the tests performed to identify the LEs are illustrated in WO2019/055946, including experimental conditions.

[0484] As illustrated in WO2019/055946, test constructs were identified as CLEs because the CLEs induced proliferation/expansion in these fed or unfed cultures without added cytokines such as IL-2 between days 7 and day 21, 28, 35, and/or 42. For example, as illustrated in WO2019/055946, effective CLEs were identified by identifying test CLEs that provided increased expansion of these in vitro cultures, whether fed or unfed with untransduced PBMCs, between day 7 and day 21, 28, 35, and/or 42 post-transduction, compared to control constructs that did not include any intracellular domains. WO2019/055946 discloses that at least one and typically more than one test CLE that included an intracellular domain from a test gene provided more expansion than every control construct that was present at day 7 post-transduction, that did not include an intracellular domain. WO2019/055946 further provides a statistical method that was used to identify exceptionally effective genes with respect to a first intracellular domain, and one or more exemplary intracellular domain(s) from these genes. The method used a Mann-Whitney-Wilcoxon test and a false discovery cutoff rate of less than 0.1 or less than 0.05. WO2019/055946 identified especially effective genes for the first intracellular domain or the second intracellular domain, for example, by analyzing scores for genes calculated as combined score for all constructs with that gene. Such analysis can use a cutoff of greater than 1, or greater than negative control constructs without any intracellular domains, or greater than 2, as shown for some of the tests disclosed in WO2019/055946.

[0485] In another embodiment, the LE provides, is capable of providing and/or possesses the property of (or a cell genetically modified and/or transduced with the LE is capable of providing, is adapted for, possesses the property of, and/or is modified for) driving T cell expansion in vivo. For example, the in vivo test can utilize a mouse model and measure T cell expansion at 15 to 25 days in vivo, or at 19 to 21 days in vivo, or at approximately 21 days in vivo, after T cells are contacted with lentiviral vectors encoding the LEs, are introduced into the mice, as disclosed in WO2019/055946,

[0486] In exemplary aspects and embodiments that include a LE, which typically include a CAR, such as methods provided herein for modifying, genetically modifying and/or transducing cells, and uses thereof, the genetically modified cell is modified so as to possess new properties not previously possessed by the cell before genetic modification and/or transduction. Such a property can be provided by genetic modification with a nucleic acid encoding a CAR or a LE, and in illustrative embodiments both a CAR and a LE. For example, in certain embodiments, the genetically modified and/or transduced cell is capable of, is adapted for, possesses the property of, and/or is modified for survival and/or proliferation in ex vivo culture for at least 7, 14, 21, 28, 35, 42, or 60 days or from between day 7 and day 14, 21, 28, 35, 42 or 60 post-transduction, in the absence of added IL-2 or in the absence of added cytokines such as IL-2, IL-15, or IL-7, and in certain illustrative embodiments, in the presence of the antigen recognized by the CAR where the method comprises modifying using a retroviral particle having a pseudotyping element and optionally a separate or fused activation domain on its surface and typically does not require pre-activation.

[0487] By capable of enhanced survival and/or proliferation in certain embodiments, it is meant that the genetically modified and/or transduced cell exhibits, is capable of, is adapted for, possesses the property of, and/or is modified for improved survival or expansion in ex vivo or in vitro culture in culture media in the absence of one or more added cytokines such as IL-2, IL-15, or IL-7, or added lymphocyte mitogenic agent, compared to a control cell(s) identical to the genetically modified and/or transduced cell(s) before it was genetically modified and/or transduced or to a control cell that was transduced with a retroviral particle identical to an on-test retroviral particle that comprises an LE or a putative LE, but without the LE or the intracellular domains of the LE, wherein said survival or proliferation of said control cell(s) is promoted by adding said one or more cytokines, such as IL-2, IL-15, or IL-7, or said lymphocyte mitogenic agent to the culture media. By added cytokine or lymphocyte mitogenic agent, it is meant that cytokine or lymphocyte mitogenic agent is added from an exogenous source to a culture media such that the concentration of said cytokine or lymphocyte mitogenic agent is increased in the culture media during culturing of the cell(s) compared to the initial culture media, and in some embodiments can be absent from the initial culture media before said adding. By “added” or “exogenously added”, it is meant that such cytokine or lymphocyte mitogenic agent is added to a lymphocyte media used to culture the modified, genetically modified, and/or transduced cell after the modifying, where the culture media may or may not already possess the cytokine or lymphocyte mitogenic agent. All or a portion of the media that includes a mixture of multiple media components is typically stored and in illustrative embodiments has been shipped to a site where the culturing takes place, without the exogenously added cytokine(s) or lymphocyte mitogenic agent(s). The lymphocyte media in some embodiments is purchased from a supplier, and a user such as a technician not employed by the supplier and not located within a supplier facility, adds the exogenously added cytokine or lymphocyte mitogenic agent to the lymphocyte media and then the genetically modified and/or transduced cells are cultured in the presence or absence of such exogenously added cytokine or lymphocyte mitogenic agent.

[0488] In some embodiments, improved or enhanced survival, expansion, and/or proliferation can be shown as an increase in the number of cells determined by sequencing DNA from cells transduced with retroviral particle (e.g. lentiviral particle) having a genome encoding CLEs and counting the occurrences of sequences present in unique identifiers from each CLE. In some embodiments, improved survival and/or improved expansion can be determined by counting the cells directly, for example with a hemocytometer or a cell counter, at each time point. In some embodiments, improved survival and/or improved expansion and/or enrichment can be calculated by dividing the number of cells at the later time point (day 21, 28, 35, and/or day 45) by the number of cells at day 7 for each construct. In some embodiments, the cells can be counted by hemocytometer or cell counters. In some embodiments, the enrichment level determined using the nucleic acid counts or the cell counts of each specific test construct can be normalized to the enrichment level of the respective control construct, i.e., the construct with the same extracellular domain and transmembrane domain but lacking the intracellular domains present in the test construct. In these embodiments, the LE encoded in the construct provides (or a cell genetically modified and/or transduced with a retroviral particle (e.g. lentiviral particle) having a genome encoding the LE is capable of providing, is adapted for, possesses the property of, and/or is modified for) at least a 1.5-fold, 2-fold, 3-fold, 4-fold, 5-fold, 6-fold, 7-fold, 8-fold, 9-fold, or 10-fold normalized enrichment level, or between 1.5 fold and 25-fold normalized enrichment level, or between 3-fold and 20-fold normalized enrichment level, or between 5-fold and 25-fold normalized enrichment level, or between 5-fold and 20-fold normalized enrichment level, or between 5-fold and 15-fold normalized enrichment level.

[0489] In some embodiments, the lymphoproliferative element can include a cytokine receptor or a fragment that includes a signaling domain thereof. In some embodiments, the cytokine receptor can be CD27, CD40, CRLF2, CSF2RA, CSF2RB, CSF3R, EPOR, GHR, IFNAR1, IFNAR2, IFNGR1, IFNGR2, IFNLR1, IL1R1, IL1RAP, IL1RL1, IL1RL2, IL2R, IL2RA, IL2RB, IL2RG, IL3RA, IL4R, IL5RA, IL6R, IL6ST, IL7R, IL7RA, IL9R, IL10RA, IL10RB, IL11RA, IL12RB1, IL13R, IL13RA1, IL13RA2, IL15R, IL15RA, IL17RA, IL17RB, IL17RC, IL17RE, IL18R1, IL18RAP, IL20RA, IL20RB, IL21R, IL22RA1, IL23R, IL27R, IL27RA, IL31RA, LEPR, LIFR, MPL, OSMR, PRLR, TGFβR, TGFβ decoy receptor, TNFRSF4, TNFRSF8, TNFRSF9, TNFRSF14, or TNFRSF18.

[0490] In some embodiments, a lymphoproliferative element, including a CLE, comprises an intracellular activating domain as disclosed hereinabove. In some illustrative embodiments a lymphoproliferative element is a CLE comprising an intracellular activating domain comprising an ITAM-containing domain, as such, the CLE can comprise an intracellular activating domain having at least 80%, 90%, 95%, 98%, or 100% sequence identity to the CD3Z, CD3D, CD3E, CD3G, CD79A, CD79B, DAP12, FCER1G, FCGR2A, FCGR2C, DAP10/CD28, or ZAP70 domains provided herein wherein the CLE does not comprise an ASTR.

[0491] In some embodiments, one or more domains of a lymphoproliferative element is fused to a modulatory domain, such as a co-stimulatory domain, and/or an intracellular activating domain of a CAR. In some embodiments of the composition and method aspects for transducing lymphocytes in whole blood, one or more intracellular domains of a lymphoproliferative element can be part of the same polypeptide as a CAR or can be fused and optionally functionally connected to some components of CARs. In still other embodiments, an engineered signaling polypeptide can include an ASTR, an intracellular activation domain (such as a CD3 zeta signaling domain), a co-stimulatory domain, and a lymphoproliferative domain. Further details regarding co-stimulatory domains, intracellular activating domains, ASTRs and other CAR domains, are disclosed elsewhere herein.

[0492] Lymphoproliferative elements provided herein typically include a transmembrane domain. For example, the transmembrane domain can have 80%, 85%, 90%, 95%, 97%, 98%, 99% or 100% sequence identity to any one of the transmembrane domains from the following genes and representative sequences disclosed in WO2019/055946: CD8 beta, CD4, CD3 zeta, CD28, CD134, CD7, CD2, CD3D, CD3E, CD3G, CD3Z, CD4, CD8A CD8B, CD27, CD28, CD40, CD79A, CD79B, CRLF2, CRLF2, CSF2RA, CSF2RB, CSF2RB, CSF3R, EPOR, FCER1G, FCGR2C, FCGRA2, GHR, ICOS, IFNAR, IFNAR1, IFNAR2, IFNGR1, IFNGR2, IFNLR1, IL1R1, IL1RAP, IL1RL1, IL1RL2, IL2RA, IL2RB, IL2RG, IL3RA, IL4R, IL5RA, IL6R, IL6ST, IL7RA, IL9R, IL10RA, IL10RB, IL11RA, IL12RB1, IL12RB2, IL13RA1, IL13RA2, IL15RA, IL17RA, IL17RB, IL17RC, IL17RD, IL17RE, IL18R1, IL18RAP, IL20RA, IL20RB, IL21R, IL22RA1, IL23R, IL27RA, IL27RA, IL31RA, LEPR, LIFR, MPL, OSMR, PRLR, TNFRSF4, TNFRSF8, TNFRSF9, TNFRSF14, and TNFRSF18 or mutants thereof that are known to promote signaling activity in certain cell types if such mutants. Transmembrane (TM) domains suitable for use in any engineered signaling polypeptide include, but are not limited to, constitutively active cytokine receptors, the TM domain from LMP1, and TM domains from type 1 TM proteins comprising a dimerizing motif, as discussed in more detail herein. In any of the aspects disclosed herein containing the transmembrane domain from a type I transmembrane protein, the transmembrane domain can be a Type I growth factor receptor, a hormone receptor, a T cell receptor, or a TNF-family receptor.

[0493] In some embodiments, CLEs include both an extracellular portion and a transmembrane portion that is from the same protein, in illustrative embodiments the same receptor, either of which in illustrative embodiments is a mutant, thus forming an extracellular and transmembrane domain. These domains can be from a cytokine receptor, or a mutant thereof, or a hormone receptor, or a mutant thereof in some embodiments that have been reported to be constitutively active when expressed at least in some cell types. In illustrative embodiments, such extracellular and transmembrane domains do not include a ligand binding region. It is believed that such domains do not bind a ligand when present in CLEs and expressed in B cells, T cells, and/or NK cells. Mutations in such receptor mutants can occur in the transmembrane region or in the extracellular juxtamembrane region. Not to be limited by theory, a mutation in at least some extracellular — transmembrane domains of CLEs provided herein, are responsible for signaling of the CLE in the absence of ligand, by bringing activating chains together that are not normally together, or by changing the confirmation of a linked transmembrane and/or intracellular domain.

[0494] Exemplary extracellular and transmembrane domains for CLEs of embodiments that include such domains, in illustrative embodiments, are extracellular regions, typically less than 30 amino acids of the membrane-proximal extracellular domains along with transmembrane domains from mutant receptors that have been reported to be constitutive, that is not require ligand binding for activation of an associated intracellular domain. In illustrative embodiments, such extracellular and transmembrane domains include IL7RA Ins PPCL, CRLF2 F232C, CSF2RB V449E, CSF3R T640N, EPOR L251C I252C, GHR E260C I270C, IL27RA F523C, and MPL S505N. In some embodiments, the extracellular and transmembrane domain does not comprise more than 10, 20, 25 30 or 50 consecutive amino acids that are identical in sequence to a portion of the extracellular and/or transmembrane domain of IL7RA, or a mutant thereof. In some embodiments, the extracellular and transmembrane domain is other than IL7RA Ins PPCL. In some embodiments, the extracellular and transmembrane does not comprise more than 10, 20, 25, 30, or 50 consecutive amino acids that are identical in sequence to a portion of the extracellular and/or transmembrane domain of IL15R.

[0495] In embodiments of any of these aspects and embodiments wherein the transmembrane domain is a type I transmembrane protein, the transmembrane domain can be a Type I growth factor receptor, a hormone receptor, a T cell receptor, or a TNF-family receptor. In an embodiment of any of the aspects and embodiments wherein the chimeric polypeptide comprises an extracellular domain and wherein the extracellular domain comprises a dimerizing motif, the transmembrane domain can be a Type I cytokine receptor, a hormone receptor, a T cell receptor, or a TNF-family receptor.

[0496] In some embodiments, the extracellular and transmembrane domain is the viral protein LMP1, or a mutant and/or fragment thereof. LMP1 is a multispan transmembrane protein that is known to activate cell signaling independent of ligand when targeted to lipid rafts or when fused to CD40 (Kaykas et al. EMBO J. 20: 2641 (2001)). A fragment of LMP1 is typically long enough to span a plasma membrane and to activate a linked intracellular domain(s). For example, the LMP1 can be between 15 and 386, 15 and 200, 15 and 150, 15 and 100, 18 and 50, 18 and 30, 20 and 200, 20 and 150, 20 and 50, 20 and 30, 20 and 100, 20 and 40, or 20 and 25 amino acids. A mutant and/or fragment of LMP1 when included in a CLE provided herein, retains its ability to activate an intracellular domain. Furthermore, if present, the extracellular domain includes at least 1, but typically at least 4 amino acids and is typically linked to another functional polypeptide, such as a clearance domain, for example, an eTag. In some embodiments, the lymphoproliferative element comprises an LMP1 transmembrane domain. In illustrative embodiments, the lymphoproliferative element comprises an LMP1 transmembrane domain and the one or more intracellular domains do not comprise an intracellular domain from TNFRSF proteins (i.e. CD40, 4- IBB, RANK, TACI, OX40, CD27, GITR, LTR, and BAFFR), TLR1 to TLR13, integrins, FcyRIII, Dectinl, Dectin2, NOD1, NOD2, CD16, IL-2R, Type I II interferon receptor, chemokine receptors such as CCR5 and CCR7, G-protein coupled receptors, TREM1, CD79A, CD79B, Ig-alpha, IPS-1, MyD88, RIG-1, MDA5, CD3Z, MyD88ΔTIR, TRIF, TRAM, TIRAP, MAL, BTK, RTK, RAC1, SYK, NALP3 (NLRP3), NALP3ΔLRR, NALP1, CARD9, DAI, IPAG, STING, Zap70, or LAT.

[0497] In other embodiments of CLEs provided herein, the extracellular domain includes a dimerizing moiety. Many different dimerizing moieties disclosed herein can be used for these embodiments. In illustrative embodiments, the dimerizing moieties are capable of homodimerizing. Not to be limited by theory, dimerizing moieties can provide an activating function on intracellular domains connected thereto via transmembrane domains. In some embodiments, the dimerizing moiety of a CLE can be an anti-idiotype extracellular recognition domain of any of the anti-idiotype polypeptides herein. As such, anti-idiotype polypeptides containing an anti-idiotype extracellular domain can be CLEs. For example, the extracellular recognition domain attached to such a CLE can dimerize upon binding of the target antibody or antibody mimetic, as disclosed elsewhere herein. In other words, in some embodiments, the CLE is part of a fusion polypeptide including an anti-idiotype polypeptide, and the fusion polypeptide is dimerized through binding of the target antibody or antibody mimetic to the anti-idiotype extracellular recognition domain. In illustrative embodiments, the CLE is not constitutively active, but rather is activated upon dimerization induced by binding of a target antibody to 2 anti-idiotype polypeptides that bind the idiotype of the target antibody. In these embodiments, the target antibody typically does not induce cytotoxicity. In some embodiments, a lymphoproliferative element provided herein comprises an extracellular domain, and in illustrative embodiments, the extracellular domain comprises a dimerizing motif. In illustrative embodiments of this aspect, the extracellular domain comprises a leucine zipper. In some embodiments, the leucine zipper is from a jun polypeptide, for example c-jun. In certain embodiments the c-jun polypeptide is the c-jun polypeptide region of ECD-11.

[0498] An extracellular domain with a dimerizing moiety can also serve a function of connecting a cell tag polypeptide, such as an anti-idiotype extracellular recognition domain of an anti-idiotype polypeptide to a cell expressing a CLE. Accordingly, in such embodiments, the dimerizing motif can serve the function of a stalk connecting an anti-idiotype extracellular recognition domain to a membrane association domain, which in LEs and CLEs is typically a transmembrane domain. Such embodiments provide an advantage of having a transmembrane domain and dimerization motif that anchor an anti-idiotype domain to a cell, while retaining their function in an LE. In some embodiments, such embodiments provide the advantage of providing for tetramerization of an intracellular domain by constitutive dimerization through an LE dimerization motif and inducible dimerization, which would form tetramers, upon binding of a target antibody that has the idiotype recognized by the anti-idiotype extracellular recognition domain. In these embodiments, the target antibody typically does not induce cytotoxicity but rather serves to tetramerize dimerized ICDs. These are useful in some apoptosis-inducing embodiments as described in other sections herein.

[0499] In some embodiments, the dimerizing agent can be located intracellularly rather than extracellularly. In some embodiments, more than one or multiples of dimerizing domains can be used. In any aspects or embodiments wherein the extracellular domain of a CLE comprises a dimerizing motif, the dimerizing motif can be selected from the group consisting of: a leucine zipper motif-containing polypeptide, CD69, CD71, CD72, CD96, Cd105, Cd161, Cd162, Cd249, CD271, and Cd324, as well as mutants and/or active fragments thereof that retain the ability to dimerize. In any of the aspects and embodiments herein wherein the extracellular domain of a CLE comprises a dimerizing motif, the dimerizing motif can require a dimerizing agent, and the dimerizing motif and associated dimerizing agent can be selected from the group consisting of: FKBP and rapamycin or analogs thereof, GyrB and coumermycin or analogs thereof, DHFR and methotrexate or analogs thereof, or DmrB and AP20187 or analogs thereof, as well as mutants and/or active fragments of the recited dimerizing proteins that retain the ability to dimerize. In some aspects and illustrative embodiments, a lymphoproliferative element is constitutively active, and is other than a lymphoproliferative element that requires a dimerizing agent for activation.

[0500] Internally dimerizing and/or multimerizing lymphoproliferative elements in one embodiment are an integral part of a system that uses a dimeric analog of the lipid permeable immunosuppressant drug, FK506, which loses its normal bioactivity while gaining the ability to crosslink molecules genetically fused to the FK506-binding protein, FKBP12. By fusing one or more FKBPs and a myristoylation sequence to the cytoplasmic signaling domain of a target receptor, one can stimulate signaling in a dimerizer drug-dependent, but ligand and ectodomain-independent manner. This provides the system with temporal control, reversibility using monomeric drug analogs, and enhanced specificity. The high affinity of third- generation AP20187/AP1903 dimerizer drugs for their binding domain, FKBP12 permits specific activation of the recombinant receptor in vivo without the induction of non-specific side effects through endogenous FKBP12. FKBP12 variants having amino acid substitutions and deletions, such as FKBP12V36, that bind to a dimerizer drug, may also be used. In addition, the synthetic ligands are resistant to protease degradation, making them more efficient at activating receptors in vivo than most delivered protein agents.

[0501] Extracellular domains for embodiments where extracellular domains have a dimerizing motif, are long enough to form dimers, such as leucine zipper dimers. As such, extracellular domains that include a dimerizing moiety can be from 15 to 100, 20 to 50, 30 to 45, or 35 to 40 amino acids, of in illustrative embodiments is a c-Jun portion of a c-Jun extracellular domain. Extracellular domains of polypeptides that include a dimerizing moiety, may not retain other functionalities. For example, for leucine zippers embodiments, such leucine zippers are capable of forming dimers because they retain a motif of leucines spaced 7 residues apart along an alpha helix. However, leucine zipper moieties of certain embodiments of CLEs provided herein, may or may not retain their DNA binding function.

[0502] A spacer of between 1 and 4 alanine residues can be included in CLEs between the extracellular domain that has a dimerizing moiety, and the transmembrane domain. Not to be limited by theory, it is believed that the alanine spacer affects signaling of intracellular domains connected to the leucine zipper extracellular region via the transmembrane domain, by changing the orientation of the intracellular domains.

[0503] In illustrative embodiments, CLEs include a cell tag domain. Details regarding cell tags are provided in other sections herein. Any of the cell tags provided herein can be part of a CLE. Typically, the cell tag is linked to the N terminus of the extracellular domain. Not to be limited by theory, in some embodiments, the extracellular domain includes the function of providing a linker, in illustrative embodiments a flexible linker, linking a cell tag domain to a cell that expresses the CLE.

[0504] Furthermore, polynucleotides that include a nucleic acid sequence encoding a CLE provided herein, also typically comprise a signal sequence to direct expression to the plasma membrane. Exemplary signal sequences are provided herein in other sections. Elements can be provided on the transcript such that both a CAR and CLE are expressed from the same transcript in certain embodiments.

### Binding and Fusogenic Elements

[0505] Many of the methods, compositions, and kits provided herein include RIPs with envelope proteins on their surface, for example, multiple copies of a T cell and/or NK cell binding polypeptide and multiple copies of a fusogenic polypeptide, also called a fusogen. A “binding polypeptide” includes one or more polypeptides, typically glycoproteins, that identify and bind the target host cell. A “fusogenic polypeptide” mediates fusion of the retroviral and target host cell membranes, thereby allowing a retroviral genome to enter the target host cell. In certain embodiments, the binding polypeptide(s) and the fusogenic polypeptide(s) are on the same envelope protein, e.g., a heterologous glycoprotein. In other embodiments, the binding polypeptide(s) and the fusogenic polypeptide(s) are on two or more different heterologous glycoproteins.

[0506] One or both of these binding and fusogenic polypeptide functions can be provided by a pseudotyping element. In some embodiments, the pseudotyping element can be one or more viral envelope proteins. In some embodiments, the binding polypeptide function of a viral envelope protein can be altered, reduced, or eliminated (e.g., the amino acids corresponding to the binding polypeptide function can be mutated or deleted). In some embodiments, the viral envelope protein with reduced or eliminated binding polypeptide function can be retargeted with a new binding polypeptide function or by mutating the original binding polypeptide function.

[0507] In some embodiments, the binding polypeptide function can be provided by any polypeptide that binds to a cell surface marker on the target cell. For example, the binding polypeptide function can be provided by an activation element, as disclosed elsewhere herein. The pseudotyping of replication incompetent recombinant retroviral particles with heterologous envelope glycoproteins typically alters the tropism of a virus and facilitates the transduction of host cells. In some embodiments provided herein, pseudotyping elements are provided as polypeptide(s)/protein(s), or as nucleic acid sequences encoding the polypeptide(s)/protein(s).

[0508] In some embodiments, the pseudotyping element comprises the envelope protein from a different virus. In some embodiments, the pseudotyping element is the feline endogenous virus (RD114) envelope protein, an oncoretroviral amphotropic envelope protein, an oncoretroviral ecotropic envelope protein, the vesicular stomatitis virus envelope protein (VSV-G) (SEQ ID NO: 336), the baboon retroviral envelope glycoprotein (BaEV) (SEQ ID NO: 337), the murine leukemia envelope protein (MuLV) (SEQ ID NO: 338), the influenza glycoprotein HA surface glycoprotein (HA), the influenza glycoprotein neurominidase (NA), the paramyxovirus Measles envelope protein H, the paramyxovirus Measles envelope protein F, the Tupaia paramyxovirus (TPMV) envelope protein H, the TPMV envelope protein F, glycoproteins G and F from the Henipavirus genus, the Nipah virus (NiV) envelope protein F, the NiV envelope protein G, the Sindbis virus (SINV) protein E1, the SINV protein E2, and/or functional variants or fragments of any of these envelope proteins (see, e.g. Frank and Bucholz Mol Ther Methods Clin Dev. 2018 Oct 17;12:19-31).

[0509] In some embodiments, the pseudotyping element can be wild-type BaEV. Not to be limited by theory, BaEV contains an R peptide that has been shown to inhibit transduction. In some embodiments, the BaEV can contain a deletion of the R peptide. In some embodiments, the BaEV can contain a deletion of the inhibitory R peptide after the nucleotides encoding the amino acid sequence HA, referred to herein as BaEVΔR (HA) (SEQ ID NO: 339). In some embodiments, the BaEV can contain a deletion of the inhibitory R peptide after the nucleotides encoding the amino acid sequence HAM, referred to herein as BaEVΔR (HAM) (SEQ ID NO: 340).

[0510] In some embodiments, the pseudotyping element can be wild-type MuLV. In some embodiments, the MuLV can contain one or more mutations to remove the furin-mediated cleavage site located between the transmembrane (TM) and surface (SU) subunits of the envelope glycoprotein. In some embodiments the MuLV contains the SUx mutation (MuLVSUx) (SEQ ID NO:372) which inhibits furin-mediated cleavage of MuLV envelope protein in packaging cells. In certain embodiments the C-terminus of the cytoplasmic tail of the MuLV or MuLVSUx protein is truncated by 4 to 31 amino acids. In certain embodiments the C-terminus of the cytoplasmic tail of the MuLV or MuLVSUx protein is truncated by 4, 8, 12, 16, 20, 24, 28, or 31 amino acids.

[0511] In some embodiments, the pseudotyping elements include a binding polypeptide and a fusogenic polypeptide derived from different proteins. In one aspect, the pseudotyping element can comprise an influenza protein hemagglutinin HA and/or a neuraminidase (NA). In certain embodiments the HA is from influenza A virus subtype H1N1. In illustrative embodiments the HA is from H1N1 PR8 1934 in which the monobasic trypsin-dependent cleavage site has been mutated to a more promiscuous multibasic sequence (SEQ ID NO:311). In certain embodiments the NA is from influenza A virus subtype H10N7. In illustrative embodiments the NA is from H10N7-HKWF446C-07 (SEQ ID NO:312). In some embodiments, the binding polypeptide can be a functional variant or fragment of VSV-G, BaEV, BaEVΔR (HA), BaEVΔR (HAM), MuLV, MuLVSUx, influenza HA, influenza NA, or Measles envelope protein H that retains the ability to bind to a target cell, and the fusogenic polypeptide can be a functional variant or fragment of VSV-G, BaEV, BaEVΔR (HA), BaEVΔR (HAM), MuLV, MuLVSUx, influenza HA, influenza NA, or Measles envelope protein F that retains the ability to mediate fusion of the retroviral and target host cell membranes.

[0512] In another aspect, the replication incompetent recombinant retroviral particles of the methods and compositions disclosed herein can be pseudotyped with the fusion (F) and/or hemagglutinin (H) polypeptides of the measles virus (MV), as non-limiting examples, clinical wildtype strains of MV, and vaccine strains including the Edmonston strain (MV-Edm) (GenBank; AF266288.2) or fragments thereof. Not to be limited by theory, both hemagglutinin (H) and fusion (F) polypeptides are believed to play a role in entry into host cells wherein the H protein binds MV to receptors CD46, SLAM, and Nectin-4 on target cells and F mediates fusion of the retroviral and host cell membranes. In an illustrative embodiment, especially where the target cell is a T cell and/or NK cell, the binding polypeptide is a Measles Virus H polypeptide and the fusogenic polypeptide is a Measles Virus F polypeptide.

[0513] In some studies, lentiviral particles pseudotyped with truncated F and H polypeptides had a significant increase in titers and transduction efficiency (Funke et al. 2008. Molecular Therapy. 16(8):1427-1436), (Frecha et al. 2008. Blood. 112(13):4843-4852). The highest titers were obtained when the F cytoplasmic tail was truncated by 30 residues (referred to as MV(Ed)-FΔ30 (SEQ ID NO:313)). For the H variants, optimal truncation occurred when 18 or 19 residues were deleted (MV(Ed)-HΔ18 (SEQ ID NO:314) or MV(Ed)-HΔ19), although variants with a truncation of 24 residues with and without replacement of deleted residues with alanine (MV(Ed)-HΔ24 (SEQ ID NO:315) and MV(Ed)-HΔ24+A) also resulted in optimal titers. Accordingly, in some embodiments, including those directed to transducing T cells and/or NK cells, the replication incompetent recombinant retroviral particles of the methods and compositions disclosed herein are pseudotyped with mutated or variant versions of the measles virus fusion (F) and hemagglutinin (H) polypeptides, in illustrative examples, cytoplasmic domain deletion variants of measles virus F and H polypeptides. In some embodiments, the mutated F and H polypeptides are “truncated H” or “truncated F” polypeptides, whose cytoplasmic portion has been truncated, i.e. amino acid residues (or coding nucleic acids of the corresponding nucleic acid molecule encoding the protein) have been deleted. “HΔY” and “FΔX” designate such truncated H and F polypeptide, respectively, wherein “Y” refers to 1-34 residues that have been deleted from the amino termini and “X” refers to 1-35 residues that have been deleted from the carboxy termini of the cytoplasmic domains. In a further embodiment, the “truncated F polypeptide” is FΔ24 or FΔ30 and/or the “truncated H protein” is selected from the group consisting of HA14, HΔ15, HA16, HA17, HΔ18, HA19, HΔ20, HΔ21+A, HΔ24 and HΔ24+4A, more preferably HΔ18 or HΔ24. In an illustrative embodiment, the truncated F polypeptide is MV(Ed)-FΔ30 and the truncated H polypeptide is MV(Ed)-HΔ18.

[0514] In some embodiments, the pseudotyping elements can be the envelope proteins from the Henipavirus genus (e.g. Nipah, Hendra, Cedar, Mojiang or Kumasi virus) and include envelope glycoprotein G (Henipavirus-G protein) and their fusion partner envelope glycoprotein F (Henipavirus-F protein). In some embodiments, the Henipavirus-F protein comprises the sequence of SEQ ID NO:374 and the Henipavirus-G protein comprises the sequence of SEQ ID NO:375. In some embodiments, the Henipavirus-F protein comprises a sequence that has at least 50%, 60%, 70%, 75%, 80%, 85%, 90%, 95%, 96%, 97%, 98%, 99% or 100% sequence identity to a stretch of at least 10, 15, 20, 25, 30, 35, 40, 45, or 50 amino acids of SEQ ID NO:374. In some embodiments, the Henipavirus-G protein comprises a sequence that has at least 50%, 60%, 70%, 75%, 80%, 85%, 90%, 95%, 96%, 97%, 98%, 99% or 100% sequence identity to a stretch of at least 10, 15, 20, 25, 30, 35, 40, 45, or 50 amino acids of SEQ ID NO:375.

[0515] In some embodiments, the Henipavirus-G protein can contain one or more mutations to modify (e.g., truncate) the cytoplasmic tail and thus improve pseudotyping and particle incorporation efficiency(Palomares et al. 2013. J Virol. 87(8):4794-4794; Witting et al. 2013. Gene Ther. 20(10):997-1005; Bender et al. 2016. Plos Pathog. 12(6): e1005641). In certain embodiments, the N-terminus of the cytoplasmic tail of any of the Henipavirus-G proteins can be truncated by 1 to all of its amino acids. In some embodiments, the residues of the Henipavirus-G protein involved in receptor binding are mutated to alter, and in illustrative embodiments remove, their native interactions with their natural receptors. In certain embodiments, the Henipavirus-G protein is mutated for example, but not limited to, at one or more of Y389, E501, W504, E505, V507, Q530, E533, or I588 of SEQ ID NO:375 (amino acids are given for Nipah-G, also referred to as NiV-G, and a skilled artisan will be able to identify the corresponding glutamines of other Henipavirus-G proteins)(Guillaume et al. 2006. J Virol. 80(15):7546-7554; Negrete et al. 2007. J Virol. 81(19):10804-10814; Xu et al. 2008. P Natl Acad Sci USA. 105(29):9953-9958; Xu et al. 2012. Plos One. 7(11): e48742; Bender et al. 2016. Plos Pathog. 12(6): e1005641). In some embodiments, Henipavirus-G protein is SEQ ID NO:375 with mutations E533A and/or Q530A. In some embodiments, one or more N- or O-glycosylation sites are mutated to improve pseudotyping and fusion (Biering et al. 2012. J Virol. 86(22):11991-12002; Stone et al. 2016. Plos Pathog. 12(2): e1005445). In some embodiments, one or more N-glycosylation sites are mutated for example, but not limited to, at one or more of N72, N159, N306, N378, N417, N481, or N529 of SEQ ID NO:375, or the corresponding glutamines of other Henipavirus-G proteins, to another amino acid such as glutamine. In some embodiments, one or more O-glycosylation sites are mutated from serine or threonine to another amino acid such as alanine. In some embodiments, one or more of the serine or threonine residues in the heavily O-glycosylated stalk domain from amino acids 103 to 137 of SEQ ID NO:375, is mutated to, for example, alanine. In other embodiments, the C-terminus of the Henipavirus-G protein can be modified and fused to a binding polypeptide and in illustrative embodiments, an activation element, such as an antibody or antibody mimetic, which in illustrative embodiments can be an anti-CD3 antibody or antibody mimetic (Bender et al. 2016. Plos Pathog. 12(6): e1005641; Jamali et al. 2019. Mol Ther-Meth Clin D. 13:371-379; Frank et al. 2020. Blood Adv. 4(22):5702-5715).

[0516] In some embodiments, the F proteins can contain one or more mutations to modify (e.g., truncate) the cytoplasmic tail and thus improve pseudotyping, particle incorporation efficiency, and/or cleavage of the F protein from the inactive F0 to the cleaved active F1 form (Khetawat et al. 2010. Virol J. 7:312; Palomares et al. 2013. J Virol. 87(8):4794-4794; Witting et al. 2013. Gene Ther. 20(10):997-1005; Bender et al. 2016. Plos Pathog. 12(6): e1005641; Johnston et al. 2017. J Virol. 91(10): e02150-16). In some embodiments, one or more N-glycosylation sites are mutated for example, but not limited to, at one or more of N64, N67, N99, N414, or N 464 to another amino acid such as glutamine. In certain embodiments, the C-terminus of the cytoplasmic tail of the envelope glycoprotein F from the Henipavirus genus (Henipavirus-F protein) is truncated by 1 to all of its amino acids. In some embodiments, the F protein can contain one or more mutations to make it more fusogenic (Aguilar et al. 2007. J Virol. 81(9):4520-4532; Weis et al. 2015. Eur J Cell Biol. 94(7-9):316-322).

[0517] In some embodiments, the pseudotyping element can include a Henipavirus-F protein and a Henipavirus-G protein from the same virus of the Henipavirus genus (i.e., homologous proteins). In some embodiments, the pseudotyping element can include a Henipavirus-F protein and a Henipavirus-G protein from different viruses of the Henipavirus genus (i.e., heterologous proteins). In some embodiments, the pseudotyping element can include a Henipavirus-F protein and a Henipavirus-G protein can be chimeras composed of domains of heterologous proteins (Bradel-Tretheway et al. 2019. J Virol. 93(13): e00577-19).

[0518] In some embodiments, any of the pseudotyping elements can contain one or more mutations to modify (e.g., truncate) the cytoplasmic tail and thus improve pseudotyping, and particle incorporation efficiency. In certain embodiments, the N-terminus of the cytoplasmic tail is truncated by 1 to all of its amino acids. In some embodiments, the residues involved in receptor binding are mutated to alter, and in illustrative embodiments remove, their native interactions with their natural receptors. Similar to the mutations for Nipah-G protein, in some embodiments, the VSV-G protein is mutated for example, but not limited to, in the residues K47 or R354, for example K47A or K47Q and/or R354A or R354Q. In some embodiments, these pseudotyping elements are fused to heterologous binding polypeptides that function to direct or redirect the pseudotyping element to a new target protein on the same or different cell target.

[0519] In some embodiments, the separate binding and/or fusogenic polypeptides comprise one or more non virally-derived proteins. In some embodiments the binding polypeptide comprises an antibody, a ligand, or a receptor that binds a polypeptide on the target cell. In some embodiments, the binding polypeptide comprises an alternative non-antibody scaffold, also referred to herein as an antibody mimetic. In any of the aspects or embodiments provided herein that include a binding polypeptide, the binding polypeptide can be an antibody mimetic. In any of the aspects or embodiments provided herein that include a binding polypeptide that is an antibody, a suitable antibody mimetic can be used instead of the antibody. In some embodiments, the antibody mimetic can be an affibody, an afflilin, an affimer, an affitin, an alphabody, an alphamab, an anticalin, a peptide aptamer, an armadillo repeat protein, an atrimer, an avimer (also known as avidity multimer), a C-type lectin domain, a cysteine-knot miniprotein, a cyclic peptide, a cytotoxic T-lymphocyte associated protein-4, a DARPin (Designed Ankyrin Repeat Protein), a fibrinogen domain, a fibronectin binding domain (FN3 domain) (e.g., adnectin or monobody), a fynomer, a knottin, a Kunitz domain peptide, a nanofitin, a leucine-rich repeat domain, a lipocalin domain, a mAb 2 or Fcab™, a nanobody, a nanoCLAMP, an OBody, a Pronectin, a single-chain TCR, a tetratricopeptide repeat domain, VHH, or a V-like domain. In some embodiments the binding polypeptide recognizes a protein on the surface of NK cells such as CD16, CD56, and CD57. In some embodiments the binding polypeptide recognizes a protein on the surface of T cells such as CD3, CD4, CD8, CD25, CD28, CD62L, CCR7, TCRa, and TCRb. In some embodiments, the binding polypeptide is also the activation element. In some embodiments, the binding polypeptide is a membrane polypeptide that binds CD3. In some embodiments, the fusogen is derived from the Sindbis virus glycoprotein that is modified to remove its binding activity, SV1, and the binding polypeptide is a membrane-bound anti-CD3 antibody (Yang et al. 2009. Pharm Res 26(6):1432-1445).

[0520] In some embodiments, the viral particles are copseudotyped with envelope glycoproteins from 2 or more heterologous viruses. In some embodiments, the viral particles are copseudotyped with VSV-G, or a functional variant or fragment thereof, and an envelope protein from RD114, BaEV, MuLV, influenza virus, measles virus, and/or a functional variant or fragment thereof. In some embodiments, the viral particles are copseudotyped with VSV-G and the MV(Ed)-H glycoprotein or the MV(Ed)-H glycoprotein with a truncated cytoplasmic domain. In illustrative embodiments, the viral particles are copseudotyped with VSV-G and MV(Ed)-HΔ24. In certain embodiments, VSV-G is copseudotyped with MuLV or MuLV with a truncated cytoplasmic domain. In other embodiments, VSV-G is copseudotyped with MuLVSUx or MuLVSUx with a truncated cytoplasmic domain. In further illustrative embodiments, VSV-G is copseudotyped with a fusion of an antiCD3scFv to MuLV.

[0521] In some embodiments, the fusogenic polypeptide is derived from a class I fusogen. In some embodiments, the fusogenic polypeptide is derived from a class II fusogen. In some embodiments, both the binding polypeptide and the separate fusogenic polypeptide are virally-derived. In some embodiments, the fusogenic polypeptide includes multiple elements expressed as one polypeptide. In some embodiments, the binding polypeptide and fusogenic polypeptide are translated from the same transcript but from separate ribosome binding sites; in other embodiments, the binding polypeptide and fusogenic polypeptide are separated by a cleavage peptide site, which not to be bound by theory, is cleaved after translation, as is common in the literature, or a ribosomal skip sequence. In some embodiments, the translation of the binding polypeptide and fusogenic polypeptide from separate ribosome binding sites results in a higher amount of the fusogenic polypeptide as compared to the binding polypeptide. In some embodiments, the ratio of the fusogenic polypeptide to the binding polypeptide is at least 2:1, at least 3:1, at least 4:1, at least 5:1, at least 6:1, at least 7:1, or at least 8:1. In some embodiments, the ratio of the fusogenic polypeptide to the binding polypeptide is between 1.5:1, 2:1, or 3:1, on the low end of the range, and 3:1, 4:1, 5:1, 6:1, 7:1, 8:1. 9:1 or 10:1 on the high end of the range.

[0522] In embodiments disclosed herein including short contacting times, many of the modified lymphocytes in a cell formulation have pseudotyping elements on their surfaces during reintroduction of the modified lymphocytes into the subject, either through association with the replication incompetent recombinant retroviral particle or by fusion of the retroviral envelopes with the plasma membranes of the modified lymphocytes. In some embodiments, at least 10%, 15%, 20%, 25%, 30%, 35%, 40%, 45%, 50%, 55%, 60%, 65%, 70%, 75%, 80%, 85%, or 90% of the modified lymphocytes in the cell formulation can include a pseudotyping element on their surfaces. In some embodiments, the pseudotyping element can be bound to the surface of the modified lymphocytes and/or the pseudotyping element can be present in the plasma membrane of the modified lymphocytes.

[0523] In some embodiments, RIPs herein include on their surface, a means for binding to a T cell and/or NK cell. In some embodiments, RIPs herein include on their surface, a means for mediating fusion of the RIP and T cell and/or NK cell membranes. In some embodiments, RIPs herein include on their surface, both a means for binding to a T cell and/or NK cell, and a means for mediating fusion of the RIP and T cell and/or NK cell membranes. In some embodiments, this is the same means.

### Activation Elements

[0524] Many of the methods and composition aspects of the present disclosure that include a replication incompetent recombinant retroviral particle further include an activation element, also referred to herein as a T cell activation element, or a nucleic acid encoding an activation element. Activation elements are envelope proteins of the replication incompetent recombinant retroviral particles. Cells of the immune system such as T lymphocytes recognize and interact with specific antigens through receptors or receptor complexes which, upon recognition or an interaction with such antigens, cause activation of the cell and expansion in the body. An example of such a receptor is the antigen-specific T lymphocyte receptor complex (TCR/CD3) expressed on the surface of T lymphocytes. The TCR recognizes antigenic peptides that are presented to it by the proteins of the major histocompatibility complex (MHC) on the surface of antigen presenting cells and other T lymphocyte targets. Stimulation of the TCR/CD3 complex results in activation of the T lymphocyte and a consequent antigen-specific immune response. Thus, activation elements provided herein, activate T cells by binding to one or more components of the T cell receptor associated complex, for example by binding to CD3. In some embodiments, the activation element can activate alone. In other cases, the activation requires activation through the TCR receptor complex in order to further activate cells. T lymphocytes also require a second, co-stimulatory signal to become fully active in vivo. Without such a signal, T lymphocytes are either non-responsive to antigen binding to the TCR, or become anergic. However, the second, co-stimulatory signal is not required for the transduction and expansion of T cells and can be provided, for example, by a later co-stimulatory signal from a CAR or LE after transduction, as provided elsewhere herein. In some embodiments, the co-stimulatory signal can be provided during transduction by, for example, CD28, a T lymphocyte protein, which interacts with CD80 and CD86 on antigen-producing cells.

[0525] Activation of the T cell receptor (TCR) CD3 complex and co-stimulation with CD28 can occur by ex vivo exposure to solid surfaces (e.g., beads) coated with anti-CD3 and anti-CD28. In some embodiments of the methods and compositions disclosed herein, resting T cells are activated by exposure to solid surfaces coated with anti-CD3 and anti-CD28 ex vivo. In other embodiments, resting T cells or NK cells, and in illustrative embodiments resting T cells, are activated by exposure to soluble anti-CD3 antibodies (e.g., at 50-150, or 75-125, or 100 ng/ml). In such embodiments, which can be part of methods for modifying, genetically modifying or transducing, in illustrative embodiments without prior activation, such activation and/or contacting can be carried out by including anti-CD3 in a transduction reaction mixture and contacting with optional incubating for any of the times provided herein. Furthermore, such activation with soluble anti-CD3 can occur by incubating lymphocytes, such as PBMCs, and in illustrative embodiments NK cells and in more illustrative embodiments, T cells, after they are contacted with retroviral particles in a media containing an anti-CD3. Such incubation can be for example, for between 5, 10, 15, 30, 45, 60, or 120 minutes on the low end of the range, and 15, 30, 45, 60, 120, 180, or 240 minutes on the high end of the range, for example, between 15 and 1 hours or 2 hours.

[0526] In certain illustrative embodiments of the methods, kits, and compositions provided herein, for example for modifying, genetically modifying, and/or transducing lymphocytes, especially T cells and/or NK cells, polypeptides that are capable of binding to an activating T cell surface protein are presented as “activation elements” on the surface of replication incompetent recombinant retroviral particles. Thus, in some embodiments, an activation element can perform the binding polypeptide function. In some embodiments, the activation element is an envelope protein. Such T cell and/or NK cell activation elements on the surface of a retroviral particle are present in embodiments herein for modifying, genetically modifying, and/or transducing lymphocytes, for example wherein the retroviral particle has a genome that encodes a CAR, self-driving CAR, or LE. In some embodiments, such retroviral particles whose surface has an activation element are used in methods and uses that include administration by subcutaneous administration, and in kit components for subcutaneous administration. The activation element function discussed herein this section, as well as the binding polypeptide and fusogenic polypeptide disclosed elsewhere herein, in certain illustrative embodiments are all found associated with the surface of a retroviral particle, as part of one, two, or three proteins, in illustrative embodiments glycoproteins, and in further illustrative embodiments, heterologous glycoproteins. For example, some activation element polypeptides, such as those that are capable of binding to CD3, can also provide a T cell binding polypeptide function.

[0527] In some embodiments, the activation element is a polypeptide capable of binding to a polypeptide on the surface of a lymphocyte, and in illustrative embodiments, a T cell and/or an NK cell. In illustrative embodiments, the activation element is capable of binding to a TCR complex polypeptide. In some embodiments, a TCR complex polypeptide is CD3D, CD3E, CD3G, CD3Z, TCRα, or TCRβ. In some embodiments, the activation element capable of binding to the TCR complex polypeptide is a polypeptide capable of binding to one or more of CD3D, CD3E, CD3G, CD3Z, TCRα, or TCRβ. In illustrative embodiments, the activation element activates ZAP-70. In some embodiments, the activation element includes a polypeptide capable of binding to CD16A, NKG2C, NKG2D, NKG2E, NKG2F, or NKG2H. In some embodiments, the polypeptide capable of binding to NKG2D is MIC-A, MIC-B, or a ULBP, for example ULBP1 or ULBP2. In further embodiments, the polypeptide capable of binding to CD16A includes capable of binding to one or more of NKp46, 2B4, CD2, DNAM, NKG2C, NKG2D, NKG2E, NKG2F, or NKG2H. In some embodiments, the activation element is a polypeptide capable of binding to one or more of the following combinations: NKp46 and 2B4, NKp46 and CD2, NKp46 and DNAM, NKp46 and NKG2D, 2B4 and DNAM, or 2B4 and NKG2D. In some embodiments, the activation element can be two or more polypeptides capable of binding to polypeptides on the surface of a lymphocyte. In some embodiments, the activation element can be one or more polypeptides capable of binding to at least one of the following combinations: NKp46 and 2B4, NKp46 and CD2, NKp46 and DNAM, NKp46 and NKG2D, 2B4 and DNAM, or 2B4 and NKG2D. In illustrative embodiments the activation element is a polypeptide capable of binding to CD3E. In some embodiments, the polypeptide capable of binding to CD3 is an anti-CD3 antibody, or a fragment thereof that retains the ability to bind to CD3. In illustrative embodiments, the anti-CD3 antibody or fragment thereof is a single chain anti-CD3 antibody, such as but not limited to, an anti-CD3 scFv. In another illustrative embodiment, the polypeptide capable of binding to CD3 is anti-CD3scFvFc. In some embodiments, the activation element is an antibody. In some embodiments, the activation element comprises an alternative non-antibody scaffold, also referred to herein as an antibody mimetic. In any of the aspects or embodiments provided herein that include an activation element capable of binding to a polypeptide on the surface of a lymphocyte, and in illustrative embodiments, a T cell, the binding polypeptide can be an antibody mimetic. In some embodiments, the antibody mimetic can be an affibody, an afflilin, an affimer, an affitin, an alphabody, an alphamab, an anticalin, a peptide aptamer, an armadillo repeat protein, an atrimer, an avimer (also known as avidity multimer), a C-type lectin domain, a cysteine-knot miniprotein, a cyclic peptide, a cytotoxic T-lymphocyte associated protein-4, a DARPin (Designed Ankyrin Repeat Protein), a fibrinogen domain, a fibronectin binding domain (FN3 domain) (e.g., adnectin or monobody), a fynomer, a knottin, a Kunitz domain peptide, a nanofitin, a leucine-rich repeat domain, a lipocalin domain, a mAb 2 or Fcab™, a nanobody, a nanoCLAMP, an OBody, a Pronectin, a single-chain TCR, a tetratricopeptide repeat domain, VHH, or a V-like domain. In any of the aspects or embodiments provided herein that include an activation element that is an antibody, a suitable antibody mimetic can be used instead of the antibody. In some embodiments, the activation element capable of binding a polypeptide on the surface of a lymphocyte (e.g. TCRβ) is a superantigen polypeptide.

[0528] A number of anti-human CD3 monoclonal antibodies and antibody fragments thereof are available, and can be used as T cell activation elements in the present invention, including but not limited to UCHT1, OKT-3, HIT3A, TRX4, X35-3, VIT3, BMA030 (BW264/56), CLB-T3/3, CRIS7, YTH12.5, F111409, CLB-T3.4.2, TR-66, TR66.opt, HuM291, WT31, WT32, SPv-T3b, 11D8, XIII-141, XIII46, XIII-87, 12F6, T3/RW2-8C8, T3/RW24B6, OKT3D, M-T301, SMC2 and F101.01. As such, RIPs herein include on their surface, a means for activating T cells.

[0529] In other embodiments, the activation element on the surfaces of the replication incompetent recombinant retroviral particles can include one or more polypeptides capable of binding CD2, CD28, OX40, 4-1BB, ICOS, CD9, CD53, CD63, CD81, and/or CD82 and optionally one or more polypeptides capable of binding CD3. In illustrative embodiments, the activation element is a polypeptide capable of binding a mitogenic tetraspanin, for example, a polypeptide capable of binding to CD81, CD9, CD53, CD63, or CD82. In some embodiments, the activation element is a tetraspanin. Tetraspanins are known in the art. In some embodiments, the tetraspanin can be TSPAN1 (TSP-1), TSPAN2 (TSP-2), TSPAN3 (TSP-3), TSPAN4 (TSP-4, NAG-2), TSPAN5 (TSP-5), TSPAN6 (TSP-6), TSPAN7 (CD231/TALLA-⅟A15), TSPAN8 (CO-029), TSPAN9 (NET-5), TSPAN10 (OCULOSPANIN), TSPAN11 (CD151-like), TSPAN12 (NET-2), TSPAN13 (NET-6), TSPAN14, TSPAN15 (NET-7), TSPAN16 (TM4-B), TSPAN17, TSPAN18, TSPAN19, TSPAN20 (UP1b, UPK1B), TSPAN21 (UP1la, UPK1A), TSPAN22 (RDS, PRPH2), TSPAN23 (ROM1), TSPAN24 (CD151), TSPAN25 (CD53), TSPAN26 (CD37), TSPAN27 (CD82), TSPAN28 (CD81), TSPAN29 (CD9), TSPAN30 (CD63), TSPAN31 (SAS), TSPAN32 (TSSC6), or TSPAN33. In some embodiments, the tetraspanin can be TSPAN1 (TSP-1), TSPAN2 (TSP-2), TSPAN3 (TSP-3), TSPAN4 (TSP-4, NAG-2), TSPAN5 (TSP-5), TSPAN6 (TSP-6), TSPAN7 (CD231/TALLA-⅟A15), TSPAN8 (CO-029), TSPAN9 (NET-5), TSPAN10 (OCULOSPANIN), TSPAN11 (CD151-like), TSPAN12 (NET-2), TSPAN13 (NET-6), TSPAN14, TSPAN15 (NET-7), TSPAN16 (TM4-B), TSPAN17, TSPAN18, TSPAN19, TSPAN20 (UP1b, UPK1B), TSPAN21 (UP1a, UPK1A), TSPAN22 (RDS, PRPH2), TSPAN23 (ROM1), TSPAN24 (CD151), TSPAN26 (CD37), TSPAN31 (SAS), TSPAN32 (TSSC6), or TSPAN33. In illustrative embodiments, the tetraspanin is TSPAN7 (CD231/TALLA-⅟A15), TSPAN9 (NET-5), TSPAN24 (CD151), TSPAN27 (CD82), TSPAN28 (CD81), TSPAN29 (CD9), or TSPAN30 (CD63). In some embodiments, the activation element is a tetraspanin, and the tetraspanin is TSPAN25 (CD53), TSPAN27 (CD82), TSPAN28 (CD81), TSPAN29 (CD9), or TSPAN30 (CD63). In some embodiments, a tetraspanin is the only envelope protein. In some embodiments, a tetraspanin is a pseudotyping element comprising the binding polypeptide and the fusogenic element. In some embodiments, a tetraspanin is the activation element and the pseudotyping element. In illustrative embodiments, the tetraspanin that is the activation element and the pseudotyping element is TSPAN29 (CD9).

[0530] In some embodiments, one or typically more copies of one or more of these activation elements can be expressed on the surfaces of the replication incompetent recombinant retroviral particles as polypeptides separate and distinct from the pseudotyping elements. In some embodiments, the activation elements can be expressed on the surfaces of the replication incompetent recombinant retroviral particles as fusion polypeptides. In illustrative embodiments, the fusion polypeptides include one or more activation elements and one or more pseudotyping elements or one or more binding and/or fusogenic elements. In further illustrative embodiments, the fusion polypeptide includes anti-CD3, for example an anti-CD3scFv, or an anti-CD3scFvFc, and a viral envelope protein. In one example the fusion polypeptide is the OKT-3scFv fused to the amino terminal end of a viral envelope protein such as the MuLV envelope protein, as shown in Maurice et al. (2002). In some embodiments, the fusion polypeptide is UCHT1scFv fused to a viral envelope protein, for example the MuLV envelop protein (SEQ ID NO:341), the MuLVSUx envelope protein (SEQ ID NO:366), VSV-G (SEQ ID NO:367), or functional variants or fragments thereof, including any of the membrane protein truncations provided herein. In illustrative embodiments, especially for compositions and methods herein for transducing lymphocytes in whole blood, the fusion polypeptide does not include any blood protein (e.g., blood Factor (e.g., Factor X)) cleavage sites in the portion of the fusion protein that resides outside the retroviral particle. In some embodiments, the fusion constructs do not include any furin cleavage sites. Furin is a membrane bound protease expressed in all mammalian cells examined, some of which is secreted and active in blood plasma (See e.g., C. Fernandez et al. J. Internal. Medicine (2018) 284; 377-387). Mutations can be made to fusion constructs using known methods to remove such protease cleavage sites.

[0531] Polypeptides that bind CD3, CD28, OX40, 4-1BB, or ICOS are referred to as activation elements because of their ability to activate resting T cells. In certain embodiments, nucleic acids encoding such an activation element are found in the genome of a replication incompetent recombinant retroviral particle that contains the activating element on its surface. In illustrative embodiments, nucleic acids encoding an activation element are not found in the replication incompetent recombinant retroviral particle genome. In some embodiments, the nucleic acids encoding an activation element are found in the genome of a virus packaging cell.

[0532] In some embodiments, the activation element is a polypeptide capable of binding to CD28, for example, an anti-CD28 antibody or an anti-CD28 scFv antibody, or a fragment thereof that retains the ability to bind to CD28. In other embodiments, the polypeptide capable of binding to CD28 is CD80, CD86, or a functional fragment thereof that is capable of binding CD28 and inducing CD28-mediated activation of Akt, such as an external fragment of CD80. In some aspects herein, an external fragment of CD80 means a fragment that is typically present on the outside of a cell in the normal cellular location of CD80, that retains the ability to bind to CD28.

[0533] Anti-CD28 antibodies are known in the art and can include, as non-limiting examples, the monoclonal antibodies 9.3 (an IgG2a antibody), KOLT-2 (an IgG1 antibody), 15E8 (an IgG1 antibody), 248.23.2 (an IgM antibody), and EX5.3D10 (an IgG2a antibody).

[0534] In an illustrative embodiment, an activation element includes two polypeptides, a polypeptide capable of binding to CD3 and a polypeptide capable of binding to CD28.

[0535] In certain embodiments, the polypeptide capable of binding to CD3 or CD28 is an antibody, a single chain monoclonal antibody or an antibody fragment, for example a single chain antibody fragment. Accordingly, the antibody fragment can be, for example, a single chain fragment variable region (scFv), an antibody binding (Fab) fragment of an antibody, a single chain antigen-binding fragment (scFab), a single chain antigen-binding fragment without cysteines (scFabΔC), a fragment variable region (Fv), a construct specific to adjacent epitopes of an antigen (CRAb), or a single domain antibody (VH or VL).

[0536] In some embodiments, at least 10%, 15%, 20%, 25%, 30%, 35%, 40%, 45%, 50%, 55%, 60%, 65%, 70%, 75%, 80%, 85%, or 90% of the modified lymphocytes in a cell formulation can include a T cell activation element on their surfaces. In some embodiments, the T cell activation element can be bound to the surface of the modified lymphocytes through, for example, a T cell receptor, and/or the pseudotyping element can be present in the plasma membrane of the modified lymphocytes.

[0537] In any of the embodiments disclosed herein, an activation element, or a nucleic acid encoding the same, can include a dimerizing or higher order multimerizing motif. Dimerizing and multimerizing motifs are well-known in the art and a skilled artisan will understand how to incorporate them into the polypeptides for effective dimerization or multimerization. In illustrative embodiments, the polypeptide capable of binding to CD3 is anti-CD3scFvFc, which in some embodiments is considered an anti-CD3 with a dimerizing motif without any additional dimerizing motif, since anti-CD3scFvFc constructs are known to be capable of dimerizing without the need for a separate dimerizing motif.

[0538] In some embodiments, when present on the surface of replication incompetent recombinant retroviral particles, an activation element including a dimerizing motif can be active in the absence of a dimerizing agent. In some embodiments, the dimerizing or multimerizing motif, or a nucleic acid sequence encoding the same, can be an amino acid sequence from transmembrane polypeptides that naturally exist as homodimers or multimers. In some embodiments, the dimerizing or multimerizing motif, or a nucleic acid sequence encoding the same, can be an amino acid sequence from a fragment of a natural protein or an engineered protein. In one embodiment, the homodimeric polypeptide is a leucine zipper motif-containing polypeptide (leucine zipper polypeptide). For example, a leucine zipper polypeptide derived from c-JUN, non-limiting examples of which are disclosed related to chimeric lymphoproliferative elements (CLEs) herein. In some embodiments, these transmembrane homodimeric polypeptides can include CD69, CD71, CD72, CD96, Cd105, Cd161, Cd162, Cd249, CD271, Cd324, or active fragments thereof.

[0539] In some embodiments, when present on the surface of replication incompetent recombinant retroviral particles, an activation element including a dimerizing motif can be active in the presence of a dimerizing agent. In some embodiments, the dimerizing motif, and nucleic acid encoding the same, can include an amino acid sequence from transmembrane proteins that dimerize upon ligand (also referred to herein as a dimerizer or dimerizing agent) binding. In some embodiments, the dimerizing motif and dimerizer can include (where the dimerizer is in parentheses following the dimerizer-binding pair): FKBP and FKBP (rapamycin or its analog); GyrB and GyrB (coumermycin or its analog); DHFR and DHFR (methotrexate); or DmrB and DmrB (AP20187). As noted above, rapamycin can serve as a dimerizer. Alternatively, a rapamycin derivative or analog can be used (see, e.g., WO96/41865; WO 99/36553; WO 01/14387; and Ye et al (1999) Science 283:88-91). A coumermycin analog can be used (see, e.g., Farrar et al. (1996) Nature 383:178-181; and U.S. Pat. No. 6,916,846). Although some embodiments of lymphoproliferative elements include a dimerizing agent, in some aspects and illustrative embodiments, a lymphoproliferative element is constitutively active, and is other than a lymphoproliferative element that requires a dimerizing agent for activation.

[0540] In some embodiments, an activation element is fused to a heterologous signal sequence and/or a heterologous membrane attachment sequence or a membrane bound protein, all of which help direct the activation element to the membrane. In some embodiments, posttranslational lipid modification can occur via myristoylation, palmitoylation, or GPI anchorage. In some embodiments, the heterologous membrane attachment sequence is a GPI anchor attachment sequence. The heterologous GPI anchor attachment sequence can be derived from any known GPI-anchored protein. In some embodiments, the heterologous GPI anchor attachment sequence is the GPI anchor attachment sequence from CD14, CD16, CD48, CD55 (DAF), CD59, CD80, and CD87. In some embodiments, the heterologous GPI anchor attachment sequence is derived from CD16. In illustrative embodiments, the heterologous GPI anchor attachment sequence is derived from Fc receptor FcγRIIIb (CD16b) or decay accelerating factor (DAF), otherwise known as complement decay-accelerating factor or CD55. In some embodiments, the activation element is attached to the membrane via an endogenous transmembrane protein.

[0541] In some embodiments, one or more of the activation elements include a heterologous signal sequence to help direct expression of the activation element to the cell membrane. Any signal sequence that is active in the packaging cell line can be used. In some embodiments, the signal sequence is a DAF signal sequence. In illustrative embodiments, an activation element is fused to a DAF signal sequence at its N terminus and a GPI anchor attachment sequence at its C terminus.

[0542] In an illustrative embodiment, the activation element includes anti-CD3 scFvFc fused to a GPI anchor attachment sequence derived from CD14 and CD80 fused to a GPI anchor attachment sequence derived from CD16b; and both are expressed on the surface of a replication incompetent recombinant retroviral particle provided herein. In some embodiments, the anti-CD3 scFvFc is fused to a DAF signal sequence at its N terminus and a GPI anchor attachment sequence derived from CD14 at its C terminus and the CD80 is fused to a DAF signal sequence at its N terminus and a GPI anchor attachment sequence derived from CD16b at its C terminus; and both are expressed on the surface of a replication incompetent recombinant retroviral particle provided herein. In some embodiments, the DAF signal sequence includes amino acid residues 1-30 of the DAF protein.

[0543] In some embodiments, an activation element can be separate from the replication incompetent recombinant retroviral particle. Thus, in some embodiments, the replication incompetent recombinant retroviral particle do not comprise an activation element on their surface.

[0544] Nucleic acid aptamers can serve as alternative molecules to antibodies for binding and/or eliciting biologic function, including for use as immunotherapeutics (Freage 2020). In any of the aspects or embodiments provided herein that include an activation element including an activation element on the surface of a RIP, a suitable DNA aptamer can be used instead of the polypeptide. Therefore, in certain embodiments, a nucleic acid aptamer capable of binding CD2, CD28, OX40, 4-1BB, ICOS, CD9, CD53, CD63, CD81, and/or CD82 is used in place of a ploypeptide. In some embodiments, a DNA aptamer capable of binding CD3 is used in place of a polypeptide capable of binding CD3. In some embodiments, ZUCH-1 or variants thereof, is used to bind CD3 and activate T-cells.

[0545] In some embodiments, more than one activation element is used. In some embodiments, the activation element can be a superantigen, for example lipopolysaccharide, SEC3, and Staphylococcal enterotoxin B. In some embodiments, the activation element can be a cytokine. In some embodiments, the activation element can be phorbol myristate acetate (PMA), ionomycin, or phytohemagglutinin (PHA). In some embodiments, the concentration of PMA in a cell formulation or to be administered separately from the replication incompetent recombinant retroviral particles can be 10, 25, 50, 75, or 100 ng/ml or between 10 and 100 ng/ml or 25 and 75 ng/ml. In some embodiments, the concentration of ionomycin in a cell formulation or to be administered separately from the replication incompetent recombinant retroviral particles can be at least or about 100, 250, 500, or 750 ng/ml or 1, 2, 3, 4, or 5 µg/ml or between 100 ng/ml and 5 µg/ml or between 500 ng/ml and 2 µg/ml. In some embodiments, the concentration of PHA in a cell formulation or to be administered separately from the replication incompetent recombinant retroviral particles can be at least or about 0.1 µg/ml, 0.25 µg/ml, 0.5 µg/ml, 1 µg/ml, 2.5 µg/ml, 5 µg/ml, 7.5 µg/ml, or 10 µg/ml or between 0.1 and 10 µg/ml, 1 and 10 µg/ml, or 2.5 and 7.5 µg/ml. In some embodiments, the activation element is administered within 5, 10, 15, 20, 30, 45, or 60 minutes, or 1, 2, 3, 4, 5, 6, 7, 8, 10, 12, 18, or 24 hours or 1, 2, 3, 4, 5, 6, 7, 14, 21, or 28 days of administering a cell formulation. In some embodiments, the activation element or elements are administered multiple times, for example on different days following administration of the cell formulation.

### Membrane-Bound Cytokines

[0546] Some embodiments of the method and composition aspects provided herein, include a membrane-bound cytokine, or polynucleotides encoding a membrane-bound cytokine. Cytokines are typically, but not always, secreted proteins. Cytokines that are naturally secreted can be engineered as fusion proteins to be membrane-bound. Membrane-bound cytokine fusion polypeptides are included in methods and compositions disclosed herein, and are also an aspect of the invention. In some embodiments, replication incompetent recombinant retroviral particles have a membrane-bound cytokine fusion polypeptide on their surface that is capable of binding a T cell and/or NK cell and promoting proliferation and/or survival thereof. Typically, membrane-bound polypeptides are incorporated into the membranes of replication incompetent recombinant retroviral particles, and when a cell is transduced by the replication incompetent recombinant retroviral particles, the fusion of the retroviral and host cell membranes results in the polypeptide being bound to the membrane of the transduced cell.

[0547] In some embodiments, the cytokine fusion polypeptide includes one or more of IL-2, IL-7, IL-15, or an active fragment.

[0548] The membrane-bound cytokine fusion polypeptides are typically a cytokine fused to heterologous signal sequence and/or a heterologous membrane attachment sequence. In some embodiments, the heterologous membrane attachment sequence is a GPI anchor attachment sequence. The heterologous GPI anchor attachment sequence can be derived from any known GPI-anchored protein (reviewed in Ferguson MAJ, Kinoshita T, Hart GW. Glycosylphosphatidylinositol Anchors. In: Varki A, Cummings RD, Esko JD, et al., editors. Essentials of Glycobiology. 2nd edition. Cold Spring Harbor (NY): Cold Spring Harbor Laboratory Press; 2009. Chapter 11). In some embodiments, the heterologous GPI anchor attachment sequence is the GPI anchor attachment sequence from CD14, CD16, CD48, CD55 (DAF), CD59, CD80, and CD87. In some embodiments, the heterologous GPI anchor attachment sequence is derived from CD16. In an illustrative embodiment, the heterologous GPI anchor attachment sequence is derived from Fc receptor FcγRIIIb (CD16b). In some embodiments, the GPI anchor is the GPI anchor of DAF.

[0549] In illustrative embodiments, the membrane-bound cytokine is a fusion polypeptide of a cytokine fused to DAF. DAF is known to accumulate in lipid rafts that are incorporated into the membranes of replication incompetent recombinant retroviral particles budding from packaging cells. Accordingly, not to be limited by theory, it is believed that DAF fusion proteins are preferentially targeted to portions of membranes of packaging cells that will become part of a recombinant retroviral membrane.

[0550] In non-limiting illustrative embodiments, the cytokine fusion polypeptide is an IL-7, or an active fragment thereof, fused to DAF. In a specific non-limiting illustrative embodiment, the fusion cytokine polypeptide includes in order: the DAF signal sequence (residues 1-31 of DAF), IL-7 without its signal sequence, and residues 36-525 of DAF.

[0551] In some embodiments, a membrane-bound cytokine fusion polypeptide comprises a cleavage site. In some embodiments, the cleavage site can be within the sequence of the cytokine. In some embodiments, the cleavage site can be within the sequence of the heterologous signal sequence. In some embodiments, the cleavage site can be within the sequence of the heterologous membrane attachment sequence. In some embodiments, the cleavage site can be between the cytokine and the heterologous signal sequence or the heterologous membrane attachment sequence.

[0552] In some embodiments, the membrane-bound cytokine fusion polypeptide can include linkers as disclosed elsewhere herein.

### Packaging Cell Lines/Methods of Making Recombinant Retroviral Particles

[0553] The present disclosure provides mammalian packaging cells and packaging cell lines that produce replication incompetent recombinant retroviral particles. The cell lines that produce replication incompetent recombinant retroviral particles are also referred to herein as packaging cell lines. A non-limiting example of such method is illustrated in WO2019/055946. Further exemplary methods for making retroviral particles are provided herein, for example in the Examples section herein. Such methods include, for example, a 4 plasmid system or a 5 plasmid system when a nucleic acid encoding an additional membrane bound protein, such as a T cell activation element that is not a fusion with the viral envelope, such as a GPI-linked anti-CD3, is included (See WO2019/05546). In an illustrative embodiment, provided herein is a 4 plasmid system in which a T cell activation element, such as a GPI-linked anti-CD3, is encoded on one of the packaging plasmids such as the plasmid encoding the viral envelope or the plasmid encoding REV, and optionally a second viral membrane-associated transgene such as a membrane bound cytokine can be encoded on the other packaging plasmid. In each case the nucleic acid encoding the viral protein is separated from the transgene by an IRES or a ribosomal skip sequence such as P2A or T2A. Such 4 plasmid system and associated polynucleotides as stated in the Examples, provided increased titers as compared to a 5 vector system in transient transfections, and thus provide illustrative embodiments herein. The present disclosure provides packaging cells and mammalian cell lines that are packaging cell lines that produce replication incompetent recombinant retroviral particles that genetically modify target mammalian cells and the target mammalian cells themselves. In illustrative embodiments, the packaging cell comprises nucleic acid sequences encoding a packageable RNA genome of the replication incompetent retroviral particle, a REV protein, a gag polypeptide, a pol polypeptide, and a pseudotyping element.

[0554] The cells of the packaging cell line can be adherent or suspension cells. Exemplary cell types are provided hereinbelow. In illustrative embodiments, the packaging cell line can be a suspension cell line, i.e., a cell line that does not adhere to a surface during growth. The cells can be grown in a chemically-defined media and/or a serum-free media. In some embodiments, the packaging cell line can be a suspension cell line derived from an adherent cell line, for example, the HEK293 cell line can be grown in conditions to generate a suspension-adapted HEK293 cell line according to methods known in the art. The packaging cell line is typically grown in a chemically defined media. In some embodiments, the packaging cell line media can include serum. In some embodiments, the packaging cell line media can include a serum replacement, as known in the art. In illustrative embodiments, the packaging cell line media can be serum-free media. Such media can be a chemically defined, serum-free formulation manufactured in compliance with Current Good Manufacturing Practice (CGMP) regulations of the US Food and Drug Administration (FDA). The packaging cell line media can be xeno-free and complete. In some embodiments, the packaging cell line media has been cleared by regulatory agencies for use in ex vivo cell processing, such as an FDA 510(k) cleared device.

[0555] Accordingly, in one aspect, provided herein is a method of making a replication incompetent recombinant retroviral particle including: A. culturing a packaging cell in suspension in serum-free media, wherein the packaging cell comprises nucleic acid sequences encoding a packageable RNA genome of the replication incompetent retroviral particle, a REV protein, a gag polypeptide, a pol polypeptide, and a pseudotyping element; and B. harvesting the replication incompetent recombinant retroviral particle from the serum-free media. In another aspect, provided herein is a method of transducing a lymphocyte with a replication incompetent recombinant retroviral particle comprising: A. culturing a packaging cell in suspension in serum-free media, wherein the packaging cell comprises nucleic acid sequences encoding a packageable RNA genome of the replication incompetent retroviral particle, a REV protein, a gag polypeptide, a pol polypeptide, and a pseudotyping element; B. harvesting the replication incompetent recombinant retroviral particle from the serum-free media; and C. contacting the lymphocyte with the replication incompetent recombinant retroviral particle, wherein the contacting is performed for less than 24 hours, 20 hours, 18 hours, 12 hours, 8 hours, 4 hours, 2 hours, 1 hour, 30 minutes, or 15 minutes (or between contacting and no incubation, or 15 minutes, 30 minutes, 1, 2, 3, or 4 hours on the low end of the range and 1, 2, 3, 4, 6, 8, 12, 18, 20, or 24 hours on the high end of the range), thereby transducing the lymphocyte.

[0556] The packageable RNA genome, in certain illustrative embodiments, is designed to express one or more target polypeptides, including as a non-limiting example, any of the engineered signaling polypeptides disclosed herein and/or one or more (e.g., two or more) inhibitory RNA molecules in opposite orientation (e.g., encoding on the opposite strand and in the opposite orientation), from retroviral components such as gag and pol. For example, the packageable RNA genome can include from 5′ to 3′: a 5′ long terminal repeat, or active truncated fragment thereof; a nucleic acid sequence encoding a retroviral cis-acting RNA packaging element; a nucleic acid sequence encoding a first and optionally second target polypeptide, such as, but not limited to, an engineered signaling polypeptide(s) in opposite orientation, which can be driven off a promoter in this opposite orientation with respect to the 5′ long terminal repeat and the cis-acting RNA packaging element, which in some embodiments is called a “fourth” promoter for convenience only (and sometimes referred to herein as the promoter active in T cells and/or NK cells), which is active in a target cell such as a T cell and/or an NK cell but in illustrative examples is not active in the packaging cell or is only inducibly or minimally active in the packaging cell; and a 3′ long terminal repeat, or active truncated fragment thereof. In some embodiments, the packageable RNA genome can include a central polypurine tract (cPPT)/central termination sequence (CTS) element. In some embodiments, the retroviral cis-acting RNA packaging element can be HIV Psi. In some embodiments, the retroviral cis-acting RNA packaging element can be the Rev Response Element. The engineered signaling polypeptide driven by the promoter in the opposite orientation from the 5′ long terminal repeat, in illustrative embodiments, is one or more of the engineered signaling polypeptides disclosed herein and can optionally express one or more inhibitory RNA molecules as disclosed in more detail herein and in WO2017/165245A2, WO2018/009923A1, and WO2018/161064A1. In some aspects, provided herein is a packageable RNA genome designed to express a self-driving CAR. Details regarding such replication incompetent recombinant retroviral particles, and composition and method aspects including a self-driving CAR, are disclosed in more detail herein, for example in the Self-Driving CAR Methods and Compositions section and in the Exemplary Embodiments section. In illustrative embodiments, the first one or more transcriptional units encoding a lymphoproliferative element is encoded in the reverse orientation and the second one or more transcriptional units encoding a CAR is in the forward orientation.

[0557] It will be understood that promoter number, such as a first, second, third, fourth, etc. promoter is for convenience only. A promoter that is called a “fourth” promoter should not be taken to imply that there are any additional promoters, such as first, second or third promoters, unless such other promoters are explicitly recited. It should be noted that each of the promoters are capable of driving expression of a transcript in an appropriate cell type and such transcript forms a transcription unit.

[0558] In some embodiments, the engineered signaling polypeptide can include a first lymphoproliferative element. Suitable lymphoproliferative elements are disclosed in other sections herein. As a non-limiting example, the lymphoproliferative element can be expressed as a fusion with a cell tag, such as an eTag, as disclosed herein. In some embodiments, the packageable RNA genome can further include a nucleic acid sequence encoding a second engineered polypeptide including a chimeric antigen receptor, encoding any CAR embodiment provided herein. For example, the second engineered polypeptide can include a first antigen-specific targeting region, a first transmembrane domain, and a first intracellular activating domain. Examples of antigen-specific targeting regions, transmembrane domains, and intracellular activating domains are disclosed elsewhere herein. In some embodiments where the target cell is a T cell, the promoter that is active in a target cell is active in a T cell, as disclosed elsewhere herein.

[0559] In some embodiments, the engineered signaling polypeptide can include a CAR, and the nucleic acid sequence can encode any CAR embodiment provided herein. For example, the engineered polypeptide can include a first antigen-specific targeting region, a first transmembrane domain, and a first intracellular activating domain. Examples of antigen-specific targeting regions, transmembrane domains, and intracellular activating domains are disclosed elsewhere herein. In some embodiments, the packageable RNA genome can further include a nucleic acid sequence encoding a second engineered polypeptide. In some embodiments, the second engineered polypeptide can be a lymphoproliferative element. In some embodiments where the target cell is a T cell or NK cell, the promoter that is active in a target cell is active in a T cell or NK cell, as disclosed elsewhere herein.

[0560] In some embodiments, the packageable RNA genome included in any of the aspects provided herein, can further include a riboswitch, as discussed in WO2017/165245A2, WO2018/009923A1, and WO2018/161064A1. In some embodiments, the nucleic acid sequence encoding the engineered signaling polypeptide can be in a reverse orientation with respect to the 5′ to 3′ orientation established by the 5′ LTR and the 3′ LTR. In further embodiments, the packageable RNA genome can further include a riboswitch and, optionally, the riboswitch can be in reverse orientation. In any of the embodiments disclosed herein, a polynucleotide including any of the elements can include a primer binding site. In illustrative embodiments, insulators and/or polyadenylation sequences can be placed before, after, between, or near genes to prevent or reduce unregulated transcription. In some embodiments, the insulator can be chicken HS4 insulator, Kaiso insulator, SAR/MAR elements, chimeric chicken insulator-SAR elements, CTCF insulator, the gypsy insulator, or the β-globin insulator or fragments thereof known in the art. In some embodiments, the insulator and/or polyadenylation sequence can be hGH polyA (SEQ ID NO:316), SPA1 (SEQ ID NO:317), SPA2 (SEQ ID NO:318), b-globin polyA spacer B (SEQ ID NO:319), b-globin polyA spacer A (SEQ ID NO:320), 250 cHS4 insulator v1 (SEQ ID NO:321), 250 cHS4 insulator v2 (SEQ ID NO:322), 650 cHS4 insulator (SEQ ID NO:323), 400 cHS4 insulator (SEQ ID NO:324), 650 cHS4 insulator and b-globin polyA spacer B (SEQ ID NO:325), or b-globin polyA spacer B and 650 cHS4 insulator (SEQ ID NO:326).

[0561] In any of the embodiments disclosed herein, a nucleic acid sequence encoding Vpx can be on the second or an optional third transcriptional unit, or on an additional transcriptional unit that is operably linked to the first inducible promoter.

[0562] Some aspects of the present disclosure include or are cells, in illustrative examples, mammalian cells, that are used as packaging cells to make replication incompetent recombinant retroviral particles, such as lentiviruses, for transduction of T cells and/or NK cells. In some aspects, provided herein are packaging cells to make replication incompetent recombinant retroviral particles that include a polynucleotide encoding a self-driving CAR. Details regarding such replication incompetent recombinant retroviral particles, and composition and method aspects including a self-driving CAR, are disclosed in more detail herein, for example in the Self-Driving CAR Methods and Compositions section and in the Exemplary Embodiments section.

[0563] Any of a wide variety of cells can be selected for in vitro production of a virus or virus particle, such as a redirected recombinant retroviral particle, according to the invention. Eukaryotic cells are typically used, particularly mammalian cells including human, simian, canine, feline, equine and rodent cells. In illustrative examples, the cells are human cells. In further illustrative embodiments, the cells reproduce indefinitely, and are therefore immortal. Examples of cells that can be advantageously used in the present invention include NIH 3T3 cells, COS cells, Madin-Darby canine kidney cells, human embryonic 293T cells and any cells derived from such cells, such as gpnlslacZ φNX cells, which are derived from 293T cells. Highly transfectable cells, such as human embryonic kidney 293T cells, can be used. By “highly transfectable” it is meant that at least about 50%, more preferably at least about 70% and most preferably at least about 80% of the cells can express the genes of the introduced DNA.

[0564] Suitable mammalian cells include primary cells and immortalized cell lines. Suitable mammalian cell lines include human cell lines, non-human primate cell lines, rodent (e.g., mouse, rat) cell lines, and the like. Suitable mammalian cell lines include, but are not limited to, HeLa cells (e.g., American Type Culture Collection (ATCC) No. CCL-2), CHO cells (e.g., ATCC Nos. CRL9618, CCL61, CRL9096), 293 cells (e.g., ATCC No. CRL-1573), Vero cells, NIH 3T3 cells (e.g., ATCC No. CRL-1658), Huh-7 cells, BHK cells (e.g., ATCC No. CCL1O), PC12 cells (ATCC No. CRL1721), COS cells, COS-7 cells (ATCC No. CRL1651), RAT1 cells, mouse L cells (ATCC No. CCLI.3), human embryonic kidney (HEK) cells (ATCC No. CRL1573), HLHepG2 cells, Hut-78, Jurkat, HL-60, and the like.

### Nucleic Acids

[0565] The present disclosure provides polynucleotides with nucleic acids encoding polypeptides of the present disclosure and nucleic acids are disclosed for use in various methods herein. A nucleic acid will in some embodiments be DNA, including, e.g., a recombinant expression construct, or as all or part of the genome of a T cell or an NK cell, for example. A nucleic acid will in some embodiments be RNA, such as a retroviral genome or an expressed transcript within a packaging cell line, a T cell or an NK, for example. A nucleic acid will in some embodiments be RNA, e.g., in vitro synthesized RNA. In some embodiments, the nucleic acid can be isolated. As used herein, the term “isolated” means that the material is removed from its original environment (e.g., the natural environment if it is naturally occurring). For example, a naturally-occurring polynucleotide, or in other embodiments a polypeptide, present in a living animal is not isolated, but the same polynucleotide or polypeptide, separated from some or all of the coexisting materials in the natural system, is isolated. Such polynucleotides could be part of a vector and/or such polynucleotides or polypeptides could be part of a composition, and still be isolated in that such vector or composition is not part of its natural environment. For example, an isolated nucleic can be part of recombinant nucleic acid vector, such as an expression vector, which in illustrative embodiments can be a replication incompetent recombinant retroviral particle. In some embodiments, the nucleic acid is manufactured in compliance with cGMP, as discussed herein for kit components.

[0566] In some embodiments, a nucleic acid provides for production of a polypeptide of the present disclosure, e.g., in a mammalian cell. In other cases, a subject nucleic acid provides for amplification of the nucleic acid encoding a polypeptide of the present disclosure.

[0567] Some polynucleotides provided herein, include promoters. Promoters suitable for use may be constitutive or inducible. For expression of the viral particle RNA, an LTR promoter or hybrid LTR promoter may be used. For example, RSV/LTR, TRE/LTR or LTR alone may be used to transcribe the nucleic acid to be packaged. Examples of LTR’s include, but are not limited to, MSCV, GALV, HIV-1, HIV-2 and MuLV. In packaging lines containing the large T antigen, for example, incorporation of the SV40 origin of replication may be included in one or more packaging vectors to amplify circular plasmid DNA during transcription and/or translation. The use of multiple promoters may be utilized to prevent transcription factor competition. For example CMV, SV40, RSV, HSVTK, TRE and other promoters may be utilized to express different components of the LV particles. In some instances, viral particle components may be expressed from integrated expression vectors. In other cases, one or more of the nucleic acids may be introduced via transient expression. In some embodiments the use of inducible promoters are used to minimize cellular toxicity before viral particle packaging.

[0568] For expression of a transgene (e.g. a CAR or an anti-idiotype polypeptide) in a genetically modified cell, such as a lymphocyte, a macrophage, or a dendritic cell, suitable promoters include any constitutive promoter known in the art. In some embodiments, the constitutive promoter can be an EF1-a promoter, PGK promoter, CMV promoter, MSCV-U3 promoter (see, e.g., Jones et al., Human Gene Therapy (2009) 20: 630-40), SV40hCD43 promoter, VAV promoter, TCRβ promoter, UBC promoter, cytomegalovirus immediate early promoter, herpes simplex virus thymidine kinase promoter, early and late SV40 promoters, promoter present in long terminal repeats from a retrovirus, mouse metallothionein-I promoter, and various art-known tissue specific promoters. In some embodiments, a constitutive promoter can include the EF1-a promoter nucleotide sequence (SEQ ID NO:350), the PGK promoter nucleotide sequence (SEQ ID NO:351), or a functional portion or variant thereof. In some embodiments, a constitutive promoter can include other than the EF1-a promoter. In some embodiments, the promoter include light and/or heavy chain immunoglobulin gene promoter and enhancer elements.

[0569] In some embodiments, the promoter is not active in the packaging line or is only minimally active in the packaging line. Such embodiments have the advantage with expression an engineered T cell receptor or a CAR, that they would reduce, minimize, or in illustrative embodiments substantially eliminate, or even eliminate expression of the engineered T cell receptor or CAR in a encapsulated nucleic acid vector such as a RIR retroviral particle or a virus-like particle because of reduced, low, negligible, substantially no, or no expression of the engineered T cell receptor or CAR in the packaging cell line used to make the encapsulated nucleic acid vector. In illustrative embodiments, such expression is reduced, substantially eliminated, or eliminated on the surface of the encapsulated nucleic acid vector (e.g. RIR particle or virus-like particle). In some embodiments, the promoter can be a T cell-specific promoter, a CD8 cell-specific promoter, a CD4 cell-specific promoter, a NKT cell specific promoter, or an NK cell-specific promoter. In some embodiments, the T cell-specific promoter can be the CD3 zeta promoter or the CD3 delta promoter (see, e.g., Ji et al., J Biol Chem. 2002 Dec 6;277(49):47898-906). In illustrative embodiments, the T cell-specific promoter can be the CD3 zeta promoter. In some embodiments, the T cell-specific promoter can be a CD8 gene promoter. In some embodiments, the T cell-specific promoter can be a CD4 gene promoter (see, e.g., Salmon et al. (1993) Proc. Natl. Acad. Sci. USA 90:7739; and Marodon et al. (2003) Blood 101:3416). In some embodiments, an NK cell-specific promoter can be a Neri (p46) promoter (see, e.g., Eckelhart et al. (2011) Blood 117:1565). In some embodiments, the specific proteins encoded by the recombinant polynucleotide vector are not expressed, displayed, and/or incorporated in the surface of the polynucleotide vector (e.g. RIP). In some embodiments, this is accomplished by means of a T cell specific promoter driving transgene expression in the polynucleotide vector. In some embodiments, that promoter is a promoter from the CD3 family. In other embodiments it is a hybrid CD3 promoter. In other embodiments, the packaging cell line encodes a repressor protein capable of substantially suppressing the expression of the lentiviral transgenes in the packaging cell line. In some embodiments that suppressor may be a TET repressor protein. In yet other embodiments, the transcription factor activate against the protein in the packaging line has been suppressed or inactivated. In some embodiments the inactivation may be achieved through DNA editing nucleases. In other embodiments the inactivation is achieved through shRNA or miRNA. In other embodiments, the suppression of the transcription factor is achieved through a dominant negative protein or degron to the transcription factor. In other embodiments, the viral nucleic acids are controlled via a ligand inducible or repressible promoter not activated in the packaging cell line.

[0570] In other embodiments, the promoter can be a reversible promoter. Suitable reversible promoters, including reversible inducible promoters are known in the art. Such reversible promoters may be isolated and derived from many organisms, e.g., eukaryotes and prokaryotes. Modification of reversible promoters derived from a first organism for use in a second organism, e.g., a first prokaryote and a second a eukaryote, a first eukaryote and a second a prokaryote, etc., is well known in the art. Such reversible promoters, and systems based on such reversible promoters but also comprising additional control proteins, include, but are not limited to, alcohol regulated promoters (e.g., alcohol dehydrogenase I (alcA) gene promoter, promoters responsive to alcohol transactivator proteins (AlcR), etc.), tetracycline regulated promoters, (e.g., promoter systems including TetActivators, TetON, TetOFF, etc.), steroid regulated promoters (e.g., rat glucocorticoid receptor promoter systems, human estrogen receptor promoter systems, retinoid promoter systems, thyroid promoter systems, ecdysone promoter systems, mifepristone promoter systems, etc.), metal regulated promoters (e.g., metallothionein promoter systems, etc.), pathogenesis-related regulated promoters (e.g., salicylic acid regulated promoters, ethylene regulated promoters, benzothiadiazole regulated promoters, etc.), temperature regulated promoters (e.g., heat shock inducible promoters (e.g., HSP-70, HSP-90, soybean heat shock promoter, etc.), light regulated promoters, synthetic inducible promoters, and the like. Further discussion of suitable promoters for use in various methods and as separate aspects, are provided herein.

[0571] In some embodiments, the promoter is inducible in a cell to be genetically modified (e.g. CAR-T cell). In some embodiments, an inducible promoter can include a T cell-specific response element or an NFAT response element. In other embodiments the promoter may be regulated by an environmental condition, such as hypoxia, temperature, glucose, pH or light. In other embodiments the promoter may be responsive to concentrations of extracellular molecules. In some instances, the locus or construct or transgene containing the suitable promoter is irreversibly switched through the induction of an inducible system. Suitable systems for induction of an irreversible switch are well known in the art, e.g., induction of an irreversible switch may make use of a Cre-lox-mediated recombination (see, e.g., Fuhrmann-Benzakein, et al., PNAS (2000) 28: e99, the disclosure of which is incorporated herein by reference). Any suitable combination of recombinase, endonuclease, ligase, recombination sites, etc. known to the art may be used in generating an irreversibly switchable promoter. Methods, mechanisms, and requirements for performing site-specific recombination, described elsewhere herein, find use in generating irreversibly switched promoters and are well known in the art, see, e.g., Grindley et al. (2006) Annual Review of Biochemistry, 567-605 and Tropp (2012) Molecular Biology (Jones & Bartlett Publishers, Sudbury, MA), the disclosures of which are incorporated herein by reference.

[0572] In some aspects, provided herein are polynucleotides that include a promoter that is particularly useful for a self-driving CAR. Details regarding such promoters, and composition and method aspects including a self-driving CAR that contain such promoters, are disclosed in more detail herein, for example in the Self-Driving CAR Methods and Compositions section and in the Exemplary Embodiments section. In some cases, the promoter is a CD8 cell-specific promoter, a CD4 cell-specific promoter, a macrophage-specific promoter, or an NK-specific promoter. For example, a CD4 gene promoter can be used.

[0573] An isolated nucleotide sequence encoding a polypeptide of the disclosure can be present in a eukaryotic expression vector and/or a cloning vector. Nucleotide sequences encoding two separate polypeptides can be cloned in the same or separate vectors. An expression vector can include a selectable marker, an origin of replication, and other features that provide for replication and/or maintenance of the vector and expression of a transgene. For example, an expression vector typically includes a promoter operably linked to a transgene. Suitable expression vectors are known in the art and include, for example, plasmids and viral vectors. In some embodiments, the expression vector is a recombinant retroviral particle, as disclosed in detail herein.

[0574] Expression vectors generally have convenient restriction sites located near the promoter sequence to provide for the insertion of nucleic acid sequences encoding heterologous proteins. A selectable marker operative in the expression host may be present.

[0575] As noted above, in some embodiments, a nucleic acid encoding a polypeptide of the present disclosure will in some embodiments be RNA, e.g., in vitro synthesized RNA. Methods for in vitro synthesis of RNA are known in the art; any known method can be used to synthesize RNA including a nucleotide sequence encoding a polypeptide of the present disclosure. Methods for introducing RNA into a host cell are known in the art. See, e.g., Zhao et al. (2010) Cancer Res. 15:9053. Introducing RNA including a nucleotide sequence encoding a polypeptide of the present disclosure into a host cell can be carried out in vitro or ex vivo or in vivo. For example, a host cell (e.g., an NK cell, a cytotoxic T lymphocyte, etc.) can be electroporated in vitro or ex vivo with RNA comprising a nucleotide sequence encoding a polypeptide of the present disclosure.

[0576] Various aspects and embodiments that include a polynucleotide, a nucleic acid sequence, and/or a transcriptional unit, and/or a vector including the same, further include one or more of a Kozak-type sequence (also called a Kozak-related sequence herein), a woodchuck hepatitis virus post-transcriptional regulatory element (WPRE), and a double stop codon or a triple stop codon, wherein one or more stop codons of the double stop codon or the triple stop codon define a termination of a reading from of at least one of the one or more transcriptional units. In certain embodiments, a polynucleotide a nucleic acid sequence, and/or a transcriptional unit, and/or a vector including the same, further includes a Kozak-type sequence having a 5′ nucleotide within 10 nucleotides upstream of a start codon of at least one of the one or more transcriptional units. Kozak determined the Kozak consensus sequence, (GCC)GCCRCCATG (SEQ ID NO:327), for 699 vertebrate mRNAs, where R is a purine (A or G) (Kozak. Nucleic Acids Res. 1987 Oct 26;15(20):8125-48). In one embodiment the Kozak-type sequence is or includes CCACCAT/UG(G) (SEQ ID NO:328), CCGCCAT/UG(G) (SEQ ID NO:329), GCCGCCGCCAT/UG(G) (SEQ ID NO:330), or GCCGCCACCAT/UG(G) (SEQ ID NO:331) (with nucleotides in parenthesis representing optional nucleotides and nucleotides separated by a slash indicated different possible nucleotides at that position, for example depending on whether the nucleic acid is DNA or RNA. In these embodiments that include the AU/TG start codon, the A can be considered position 0. In certain illustrative embodiments, the nucleotides at -3 and +4 are identical, for example the -3 and +4 nucleotides can be G. In another embodiment the Kozak-type sequence includes an A or G in the 3rd position upstream of ATG where ATG is the start codon. In another embodiment the Kozak-type sequence includes an A or G in the 3rd position upstream of AUG where AUG is the start codon. In an illustrative embodiment, the Kozak sequence is (GCC)GCCRCCATG (SEQ ID NO:327), where R is a purine (A or G). In an illustrative embodiment, the Kozak-type sequence is GCCGCCACCAUG (SEQ ID NO:332). In another embodiment, which can be combined with the preceding embodiment that includes a Kozak-type sequence and/or the following embodiment that includes triple stop codon, the polynucleotide includes a WPRE element. WPREs have been characterized in the art (See e.g., (Higashimoto et al., Gene Ther. 2007; 14: 1298)) and as illustrated in WO2019/055946. In some embodiments, the WPRE element is located 3′ of a stop codon of the one or more transcriptional units and 5′ to a 3′ LTR of the polynucleotide. In another embodiment, which can be combined with either or both of the preceding embodiments (i.e. an embodiment wherein the polynucleotide includes a Kozak-type sequence and/or an embodiment wherein the polynucleotide includes a WPRE), the one or more transcriptional units terminates with one or more stop codons of a double stop codon or a triple stop codon, wherein the double stop codon includes a first stop codon in a first reading frame and a second stop codon in a second reading frame, or a first stop codon in frame with a second stop codon, and wherein the triple stop codon includes a first stop codon in a first reading frame, a second stop codon in a second reading frame, and a third stop codon in a third reading frame, or a first stop codon in frame with a second stop codon and a third stop codon.

[0577] A triple stop codon herein includes three stop codons, one in each reading frame, within 10 nucleotides of each other, and preferably having overlapping sequence, or three stop codons in the same reading frame, preferably at consecutive codons. A double stop codon means two stop codons, each in a different reading frame, within 10 nucleotides of each other, and preferably having overlapping sequences, or two stop codons in the same reading frame, preferably at consecutive codons.

[0578] In some of the methods and compositions disclosed herein, the introduction of DNA into PBMCs, B cells, T cells and/or NK cells and optionally the incorporation of the DNA into the host cell genome, is performed using methods that use recombinant nucleic acid vectors other than replication incompetent recombinant retroviral particles. For example, other viral vectors can be utilized, such as those derived from adenovirus, adeno-associated virus, or herpes simplex virus-1, as non-limiting examples.

[0579] In some embodiments, methods provided herein, and associated uses, reaction mixtures, kits and cell formulations can include transfecting cells with polynucleotides that are not encoded in viral vectors. Such polynucleotides can be referred to as non-viral vectors. In any of the embodiments disclosed herein that utilize non-viral vectors to genetically modify or transfect cells, the non-viral vectors, including for example, plasmids or naked DNA, can be introduced into the cells, such as for example, PBMCs, B cells, T cells and/or NK cells using methods that include electroporation, nucleofection, liposomal formulations, lipids, dendrimers, cationic polymers such as poly(ethylenimine) (PEI) and poly(1-lysine) (PLL), nanoparticles, cell-penetrating peptides, microinjection, and/or non-integrating lentiviral vectors. In some embodiments, the liposomal formulations, lipids, dendrimers, PEI, PLL, nanoparticles, and cell-penetrating peptides can be modified to include lymphocyte-targeting ligands, for example, an anti-CD3 antibody. PEI coupled to anti-CD3 antibodies was shown to efficiently transfect PBMCs with an exogenous nucleic acid (O′Neill et al. Gene Ther. 2001 Mar;8(5):362-8). Similarly, nanoparticles made from polyglutamic acid molecules coupled to anti-CD3e f(ab′)2 fragments transfected T lymphocytes (Smith et al. Nat Nanotechnol. 2017 Aug; 12(8): 813-820). In some embodiments, DNA can be introduced into cells, such as PBMCs, B cells, T cells and/or NK cells in a complex with liposomes and protamine. Other methods for transfecting T cells and/or NK cells ex vivo that can be used in embodiments of methods provided herein, are known in the art (see e.g., Morgan and Boyerinas, Biomedicines. 2016 Apr 20; 4(2). pii: E9, incorporated by reference herein in its entirety).

[0580] In some embodiments of method provided herein, DNA can be integrated into the genome using transposon-based carrier systems by co-transfection, co-nucleofection or co-electroporation of target DNA as plasmid containing the transposon ITR fragments in 5′ and 3′ ends of the gene of interest and transposase carrier system as DNA or mRNA or protein or site specific serine recombinases such as phiC31 that integrates the gene of interest in pseudo attP sites in the human genome, in this instance the DNA vector contains a 34 to 40 bp attB site that is the recognition sequence for the recombinase enzyme (Bhaskar Thyagarajan et al. Site-Specific Genomic Integration in Mammalian Cells Mediated by Phage <pC31 Integrase, Mol Cell Biol. 2001 Jun; 21(12): 3926-3934) and co transfected with the recombinase. For T cells and/or NK cells, transposon-based systems that can be used in certain methods provided herein utilize the Sleeping Beauty DNA carrier system (see e.g., U.S. Pat. No. 6,489,458 and U.S. Pat. Appl. No. 15/434,595, incorporated by reference herein in their entireties), the PiggyBac DNA carrier system (see e.g., Manuri et al., Hum Gene Ther. 2010 Apr;21(4):427-37, incorporated by reference herein in its entirety), or the ToLCDR2transposon system (see e.g., Tsukahara et al., Gene Ther. 2015 Feb; 22(2): 209-215, incorporated by reference herein in its entirety) in DNA, mRNA, or protein form. In some embodiments, the transposon and/or transposase of the transposon-based vector systems can be produced as a minicircle DNA vector before introduction into T cells and/or NK cells (see e.g., Hudecek et al., Recent Results Cancer Res. 2016;209:37-50 and Monjezi et al., Leukemia. 2017 Jan;31(1):186-194, incorporated by reference herein in their entireties). However, in some situations, the transposase-based carrier systems are not the preferred method of introducing an exogenous nucleic acid. Thus, in some embodiments, a polynucleotide of any of the aspects or embodiments disclosed herein does not include the transposon ITR fragments. In some embodiments, a modified, genetically modified, and/or transduced cell of any of the aspects or embodiments disclosed herein does not include the transposase carrier system as DNA or mRNA or protein.

[0581] The anti-idiotype polypeptide, CAR or lymphoproliferative element can also be integrated into the defined and specific sites in the genome using CRISPR or TALEN mediated integration, by adding 50-1000 bp homology arms homologous to the integration 5′ and 3′ of the target site (Jae Seong Lee et al. Scientific Reports 5, Article number: 8572 (2015), Site-specific integration in CHO cells mediated by CRISPR/Cas9 and homology-directed DNA repair pathway). CRISPR or TALEN provide specificity and genomic-targeted cleavage and the construct will be integrated via homology-mediated end joining (Yao X et al. Cell Res. 2017 Jun;27(6):801-814. doi: 10.1038/cr.2017.76. Epub 2017 May 19). The CRISPR or TALEN can be co-transfected with target plasmid as DNA, mRNA, or protein.

[0582] For any of the methods for modifying, genetically modifying, and/or transducing T and/or NK cells (e.g., in whole blood or in whole blood fractions such as TNCs or PBMCs), or uses that include such methods, or modified cells produced using such methods, and any other method or product-by-process provided herein, a skilled artisan will understand where an exogenous nucleic acid(s) could be introduced into the cells using methods that do not include a replication incompetent recombinant retroviral particle, for example using another type of recombinant vector (e.g. a plasmid associated with a lipid transfection agent).

### Inhibitory RNA Molecules

[0583] Embodiments of any of the aspects provided herein can include recombinant retroviral particles whose genomes are constructed to induce expression of one or more, and in illustrative embodiments two or more, inhibitory RNA molecules, such as for example, a miRNA or shRNA, after integration into a host cell, such as a lymphocyte (e.g., a T cell and/or an NK cell). Such inhibitory RNA molecules can be encoded within introns, including for example, an EF1-a intron. This takes advantage of the present teachings of methods to maximize the functional elements that can be included in a packageable retroviral genome to overcome shortcomings of prior teachings and maximize the effectiveness of such recombinant retroviral particles in adoptive T cell therapy.

[0584] In some embodiments, the inhibitory RNA molecule includes a 5′ strand and a 3′ strand (in some examples, sense strand and antisense strand) that are partially or fully complementary to one another such that the two strands are capable of forming a 18-25 nucleotide RNA duplex within a cellular environment. The 5′ strand can be 18, 19, 20, 21, 22, 23, 24, or 25 nucleotides in length, and the 3′ strand can be 18, 19, 20, 21, 22, 23, 24, or 25 nucleotides in length. The 5′ strand and the 3′ strand can be the same or different lengths, and the RNA duplex can include one or more mismatches. Alternatively, the RNA duplex has no mismatches. In some illustrative, a vector or genome herein, includes 2 or more, of the inhibitory RNA provided herein.

[0585] The inhibitory RNA molecules included in compositions and methods provided herein, in certain illustrative examples, do not exist and/or are not expressed naturally in T cells into whose genome they are inserted. In some embodiments, the inhibitory RNA molecule is a miRNA or an shRNA. In some embodiments, an inhibitory molecule of an embodiment of the present disclosure is a precursor of a miRNA, such as for example, a Pri-miRNA or a Pre-miRNA, or a precursor of an shRNA. In some embodiments, the miRNA or shRNA are artificially derived (i.e., artificial miRNAs or siRNAs). In other embodiments, the inhibitory RNA molecule is a dsRNA (either transcribed or artificially introduced) that is processed into an siRNA or the siRNA itself. In some embodiments, the miRNA or shRNA has a sequence that is not found in nature, or has at least one functional segment that is not found in nature, or has a combination of functional segments that are not found in nature.

[0586] In some embodiments, inhibitory RNA molecules are positioned in the first nucleic acid molecule in a series or multiplex arrangement such that multiple miRNA sequences are simultaneously expressed from a single polycistronic miRNA transcript. In some embodiments, the inhibitory RNA molecules can be adjoined to one another either directly or indirectly by non-functional linker sequence(s). The linker sequence in some embodiments, is between 5 and 120 nucleotides in length, and in some embodiments can be between 10 and 40 nucleotides in length, as non-limiting examples. In some embodiments, functional sequences can be expressed from the same transcript as the inhibitory RNA molecules, for example, any of the lymphoproliferative elements provided herein. In some embodiments, the inhibitory RNA molecule is a naturally occurring miRNA such as but not limited to miR-155, miR-30, miR-17-92, miR-122, and miR-21. In some embodiments, an inhibitory RNA molecule includes from 5′ to 3′ orientation: a 5′ microRNA flanking sequence, a 5′ stem, a loop, a 3′ stem that is partially or fully complementary to said 5′ stem, and a 3′ microRNA flanking sequence. In some embodiments, the 5′ stem (also called a 5′ arm herein) is 18, 19, 20, 21, 22, 23, 24 or 25 nucleotides in length. In some embodiments, the 3′ stem (also called a 3′ arm herein) is 18, 19, 20, 21, 22, 23, 24, or 25 nucleotides in length. In some embodiments, the loop is 3 to 40, 10 to 40, 20 to 40, or 20 to 30 nucleotides in length, and in illustrative embodiments the loop can be 18, 19, 20, 21, or 22 nucleotides in length. In some embodiments, one stem is two nucleotides longer than the other stem. The longer stem can be the 5′ or the 3′ stem. The inhibitory RNA molecule can be any of the inhibitory RNA molecules in the Inhibitory RNA Molecules section herein.

[0587] In some embodiments, the 5′ microRNA flanking sequence, 3′ microRNA flanking sequence, or both, are derived from a naturally occurring miRNA, such as but not limited to miR-155, miR-30, miR-17-92, miR-122, and miR-21. In certain embodiments, the 5′ microRNA flanking sequence, 3′ microRNA flanking sequence, or both, are derived from a miR-155, such as, e.g., the miR-155 from Mus musculus or Homo sapiens. Inserting a synthetic miRNA stem-loop into a miR-155 framework (i.e., the 5′ microRNA flanking sequence, the 3′ microRNA flanking sequence, and the loop between the miRNA 5′ and 3′ stems) is known to one of ordinary skill in the art (Chung, K. et al. 2006. Nucleic Acids Research. 34(7): e53; US 7,387,896) for example the SIBR and eSIBR sequences. In some embodiments of the present disclosure, miRNAs can be placed in the SIBR or eSIBR miR-155 framework. In illustrative embodiments herein, miRNAs are placed in a miR-155 framework that includes the 5′ microRNA flanking sequence of miR-155 represented by SEQ ID NO:333 or a functional variant thereof, the 3′ microRNA flanking sequence represented by SEQ ID NO:334 (nucleotides 221-265 of the Mus musculus BIC noncoding mRNA) or a functional variant thereof; and a modified miR-155 loop (SEQ ID NO:335) or a functional variant thereof. However, any known microRNA framework that is functional to provide proper processing within a cell of miRNAs inserted therein to form mature miRNA capable of inhibiting expression of a target mRNA to which they bind, is contemplated within the present disclosure.

[0588] In some embodiments, where two or more inhibitory RNA molecules (in some examples, 1, 2, 3, 4, 5, 6, 7, 8, 9, or 10 inhibitory RNA molecules) are included, these inhibitory RNA molecules are directed against the same or different RNA targets (such as e.g., mRNAs transcribed from genes of interest).

[0589] In some embodiments, the one or more inhibitor RNA molecules are one or more lymphoproliferative elements, accordingly, in any aspect or embodiment provided herein that includes a lymphoproliferative element, unless incompatible therewith, or already stated therein. In illustrative embodiments, miRNAs inserted into the genome of T cells in methods provided herein, are directed at targets such that proliferation of the T cells is induced and/or enhanced and/or apoptosis is suppressed. In some embodiments, the RNA targets are mRNAs transcribed from genes that are miR-155 targets.

[0590] In some embodiments, the inhibitory RNA, for example miRNA, targets mRNA encoding ABCG1, Cbl Proto-Oncogene (RNF55) (also known as cCBL and RNF55) (HGNC: 1541, Entrez Gene: 867, OMIM: 165360), T-Cell Receptor T3 Zeta Chain (CD3z) (HGNC: 1677, Entrez Gene: 919, OMIM: 186780), T cell receptor alpha locus (TCRA) (also known as TCRα) (HGNC: 12027, Entrez Gene: 6955, OMIM: 186880), T cell receptor beta locus (TCRB) (also known as TCRβ) (HGNC: 12155, Entrez Gene: 6957, OMIM: 186930), PD1, CTLA4, IFN gamma, T Cell Immunoglobulin Mucin 3 (TIM3) (also known as Hepatitis A Virus Cellular Receptor 2) (HGNC: 18437 Entrez Gene: 84868, OMIM: 606652), Lymphocyte Activating 3 (LAG3) (HGNC: 6476, Entrez Gene: 3902, OMIM: 153337), SMAD2, TNF Receptor Superfamily Member 10b (TNFRSF10B) (HGNC: 11905, Entrez Gene: 8795, OMIM: 603612), Protein Phosphatase 2 Catalytic Subunit Alpha (PPP2CA) (HGNC: 9299, Entrez Gene: 5515, OMIM: 176915), Tumor Necrosis Factor Receptor Superfamily Member 6 (TNFRSF6) (also known as Fas Cell Surface Death Receptor (FAS)) (HGNC: 11920, Entrez Gene: 355, OMIM: 134637), B And T Lymphocyte Associated (BTLA) (HGNC: 21087, Entrez Gene: 151888, OMIM: 607925), T Cell Immunoreceptor With Ig And ITIM Domains (TIGIT) (HGNC: 26838, Entrez Gene: 201633, OMIM: 612859), Adenosine A2a Receptor (ADORA2A or A2AR) (HGNC: 263, Entrez Gene: 135, OMIM: 102776), Aryl Hydrocarbon Receptor (AHR) (HGNC: 348, Entrez Gene: 196, OMIM: 600253), Eomesodermin (EOMES) (HGNC: 3372, Entrez Gene: 8320, OMIM: 604615), SMAD Family Member 3 (SMAD3) (HGNC: 6769, Entrez Gene: 4088, OMIM: 603109), SMAD Family Member 4 (SMAD4) (GNC: 6770, Entrez Gene: 4089, OMIM: 600993), TGFBR2, TRAIL2, PP2A, Protein Phosphatase 2 Regulatory Subunit B delta (PPP2R2D) (HGNC: 23732, Entrez Gene: 55844, OMIM: 613992), Tumor Necrosis Factor Ligand Superfamily Member 6 (TNFSF6) (also known as FASL) (HGNC: 11936, Entrez Gene: 356, OMIM: 134638), Caspase 3 (CASP3) HGNC: 1504, Entrez Gene: 836, OMIM: 600636), SOCS1, Suppressor Of Cytokine Signaling 2 (SOCS2) (HGNC: 19382, Entrez Gene: 8835, OMIM: 605117), Kruppel Like Factor 10 (KLF10) (also known as TGFB-Inducible Early Growth Response Protein 1 (TIEG1)) (HGNC: 11810, Entrez Gene: 7071, OMIM: 601878), JunB Proto-Oncogene, AP-1 Transcription Factor Subunit (JunB) (HGNC: 6205, Entrez Gene: 3726, OMIM: 165161), Chromobox 1 (Cbx) (HGNC: 1551, Entrez Gene: 10951, OMIM: 604511), Cbx3, Tet Methylcytosine Dioxygenase 2 (Tet2) (HGNC: 25941, Entrez Gene: 54790, OMIM: 612839), Hexokinase 2 (HK2) (HGNC: 4923, Entrez Gene: 3099, OMIM: 601125), Src homology region 2 domain-containing phosphatase-1 (SHP1) (HGNC: 9658, Entrez Gene: 5777, OMIM: 176883), Src homology region 2 domain-containing phosphatase-2 (SHP2) (HGNC: 9644, Entrez Gene: 5781, OMIM: 176876), colony stimulating factor 2 (CSF2; GMCSF) (Entrez Gene: 1437). In some embodiments, the inhibitory RNA, for example miRNA, targets the antigen that the ASTR of the CAR binds to.

[0591] In some aspects, provided herein is a polynucleotide designed to express a self-driving CAR. Details regarding such replication incompetent recombinant retroviral particles, and composition and method aspects including a self-driving CAR, are disclosed in more detail herein, for example in the Self-Driving CAR Methods and Compositions section and in the Exemplary Embodiments section. In some embodiments, the polynucleotides designed to express a self-driving CAR can include any of the inhibitory RNA molecules disclosed herein. Such polynucleotides can also have inhibitory RNA molecules that target inhibitors of the NFAT pathway, with or without the other inhibitory RNA molecules disclosed herein. In some embodiments, the inhibitory RNA molecules can target CABIN, Homer2, AKAP5, LRRK2, and/or DSCR1/MCIP (knockdown of the RNA molecules encoding these proteins can reduce inhibition of calcineurin or calmodulin); and/or Dyrk1A, CK1, and/or GSK3 (knockdown of the RNA molecules encoding these proteins can prevent phosphorylation, and nuclear export, of NFAT). In some further illustrative embodiments, a vector or genome herein, includes 2 or more, 2-10, 2-8, 2-6, 3-5, 2, 3, 4, 5, 6, 7, or 8 of the inhibitory RNA (e.g., miRNA) identified herein, for example in the paragraph immediately above.

[0592] In some embodiments provided herein, the two or more inhibitory RNA molecules can be delivered in a single intron, such as but not limited to EF1-a intron A. Intron sequences that can be used to harbor miRNAs for the present disclosure include any intron that is processed within a T cell. Sequence requirements for introns are known in the art. In some embodiments, such intron processing is operably linked to a riboswitch, such as any riboswitch disclosed herein. Accordingly, in illustrative embodiments provided herein is a combination of an miRNA directed against an endogenous T cell receptor subunit, wherein the expression of the miRNA is regulated by a riboswitch, which can be any of the riboswitches discussed herein.

[0593] In some embodiments, inhibitory RNA molecules can be provided on multiple nucleic acid sequences that can be included on the same or a different transcriptional unit. For example, a first nucleic acid sequence can encode one or more inhibitory RNA molecules and be expressed from a first promoter and a second nucleic acid sequence can encode one or more inhibitory RNA molecules and be expressed from a second promoter. In illustrative embodiments, two or more inhibitory RNA molecules are located on a first nucleic acid sequence that is expressed from a single promoter. The promoter used to express such miRNAs, are typically promoters that are inactive in a packaging cell used to express a retroviral particle that will deliver the miRNAs in its genome to a target T cell, but such promoter is active, either constitutively or in an inducible manner, within a T cell. The promoter can be a Pol I, Pol II, or Pol III promoter. In some illustrative embodiments, the promoter is a Pol II promoter.

### Characterization and Commercial Production Methods

[0594] The present disclosure provides various methods and compositions that can be used as research reagents in scientific experimentation and for commercial production. Such scientific experimentation can include methods for characterization of lymphocytes, such as NK cells and in illustrative embodiments, T cells using methods for modifying, for example genetically modifying and/or transducing lymphocytes provided herein. Such methods for example, can be used to study activation of lymphocytes and the detailed molecular mechanisms by which activation makes such cells transducible. Furthermore, provided herein are modified and in illustrative embodiments genetically modified lymphocytes that will have utility for example, as research tools to better understand factors that influence T cell proliferation and survival. In some embodiments, modified cells can express anti-idiotype polypeptides herein, which for example can serve as cell tags for identifying transduced cells. Such modified lymphocytes, such as NK cells and in illustrative embodiments T cells, can furthermore be used for commercial production, for example for the production of certain factors, such as growth factors and immunomodulatory agents, that can be harvested and tested or used in the production of commercial products.

[0595] The scientific experiments and/or the characterization of lymphocytes can include any of the aspects, embodiments, or subembodiments provided herein useful for analyzing or comparing lymphocytes. In some embodiments, T cells and/or NK cells can be transduced with the replication incompetent recombinant retroviral particles provided herein that include polynucleotides. In some embodiments, transduction of the T cells and/or NK cells can include polynucleotides that include polynucleotides encoding polypeptides of the present disclosure, for example, anti-idiotype polypeptides, CARs, lymphoproliferative elements, and/or activation elements. In some embodiments, the polynucleotides can include inhibitory RNA molecules as discussed elsewhere herein. In some embodiments, the lymphoproliferative elements can be chimeric lymphoproliferative elements.

### Exemplary Embodiments

[0596] Provided in this Exemplary Embodiments section are non-limiting exemplary aspects and embodiments provided herein and further discussed throughout this specification. For the sake of brevity and convenience, all of the aspects and embodiments disclosed herein and all of the possible combinations of the disclosed aspects and embodiments are not listed in this section. Additional embodiments and aspects are provided in other sections herein. Furthermore, it will be understood that embodiments are provided that are specific embodiments for many aspects, as discussed in this entire disclosure. It is intended in view of the full disclosure herein, that any individual embodiment recited below or in this full disclosure can be combined with any aspect recited below or in this full disclosure where it is an additional element that can be added to an aspect or because it is a narrower element for an element already present in an aspect. Such combinations are discussed more specifically in other sections of this detailed description. Thus, for example any of the embodiments provided herein can be used in any of the polynucleotide, polynucleotide vector, method, use, reaction mixture, cell formulation, kit, cell processing assembly, filter assembly, modified, genetically modified, and transduced cell, e.g. T cell or NK cell, cell mixtures, or cell populations aspect provided herein, unless incompatible with, or otherwise stated.

[0597] Accordingly, in some aspects, provided herein is a polynucleotide, comprising nucleic acids encoding an anti-idiotype polypeptide comprising an anti-idiotype extracellular recognition domain (anti-id ERD) that recognizes an idiotype of a target antibody or a target antibody mimetic. A polynucleotide that includes nucleic acids encoding an anti-idiotype extracellular recognition domain (anti-id ERD) that recognizes an idiotype of a target antibody or a target antibody mimetic can be called herein, an anti-idiotype polynucleotide or an anti-idiotype encoding polynucleotide, or an anti-id polynuc. The anti-id ERD of an anti-id polynucleotide can be any of the anti-id ERDs disclosed herein, and the anti-idiotype polypeptide encoded by such anti-idiotype polynucleotide can be any of the anti-idiotype polypeptides disclosed herein, or encoded by any of the anti-idiotype polynucleotides herein. Such anti-idiotype polypeptides encoded by any of the anti-idiotype polypeptides herein, themselves are separate embodiments herein. In some embodiments, an anti-idiotype polynucleotide further comprises nucleic acids encoding a membrane association domain (MAD) and further in some embodiments, nucleic acids encoding a stalk. In some illustrative embodiments, the polynucleotide that encodes an anti-idiotype polypeptide can further includes nucleic acids encoding one or more inhibitory RNA molecules and/or a first engineered signaling polypeptide.

[0598] In one aspect, provided herein is a polynucleotide, comprising: one or more transcriptional units, wherein each of the one or more transcriptional units is operatively linked to a promoter wherein the one or more transcriptional units comprise:
[0599] a) nucleic acids encoding one or more inhibitory RNA molecules and/or a first engineered signaling polypeptide, and
[0600] b) nucleic acids encoding an anti-idiotype polypeptide comprising an extracellular recognition domain and a membrane association domain, wherein the extracellular recognition domain comprises an anti-idiotype domain that recognizes an idiotype of a target antibody or a target antibody mimetic.

[0601] In one aspect, provided herein is a polynucleotide, comprising: one or more transcriptional units, wherein each of the one or more transcriptional units is operatively linked to a promoter active in T cells and/or NK cells, wherein the one or more transcriptional units comprise:
[0602] a) nucleic acids encoding one or more inhibitory RNA molecules, lymphoproliferative elements, cytokines, chimeric antigen receptors (CARs), and recombinant T cell receptor (TCRs), and
[0603] b) nucleic acids encoding an anti-idiotype polypeptide comprising an anti-idiotype extracellular recognition domain that recognizes an idiotype of a target antibody or target antibody mimetic.

[0604] In one aspect, provided herein is a polynucleotide, comprising: one or more transcriptional units, wherein each of the one or more transcriptional units is operatively linked to a promoter active in T cells and/or NK cells, wherein the one or more transcriptional units comprise:
[0605] a) nucleic acids encoding one or more inhibitory RNA molecules and/or one or more of a lymphoproliferative element, a cytokine, a chimeric antigen receptor (CAR), and a recombinant T cell receptor (TCR), and
[0606] b) nucleic acids encoding an anti-idiotype polypeptide comprising an anti-idiotype extracellular recognition domain that recognizes an idiotype of a target antibody or target antibody mimetic, a membrane association domain, and a stalk that connects the anti-idiotype extracellular recognition domain to the membrane association domain.

[0607] In one aspect, provided herein is a polynucleotide, comprising: one or more transcriptional units, wherein each of the one or more transcriptional units is operatively linked to a promoter, wherein the one or more transcriptional units comprise:
[0608] a) nucleic acids encoding one or more inhibitory RNA molecules and/or one or more engineered signaling polypeptide selected from a lymphoproliferative element, a cytokine, a chimeric antigen receptor (CAR), and a recombinant T cell receptor (TCR), and
[0609] b) nucleic acids encoding an anti-idiotype polypeptide comprising an anti-idiotype extracellular recognition domain, a membrane association domain, and a stalk that connects the anti-idiotype extracellular recognition domain to the membrane association domain, wherein the anti-idiotype extracellular recognition domain comprises an idiotype-binding variable region of an anti-idiotype antibody or antibody mimetic that recognizes the idiotype of a target antibody or a target antibody mimetic.

[0610] In one aspect, provided herein is a polynucleotide, comprising: one or more transcriptional units, wherein each of the one or more transcriptional units is operatively linked to a promoter active in T cells and/or NK cells, wherein the one or more transcriptional units comprise:
[0611] a) nucleic acids encoding one or more engineered signaling polypeptide, wherein a first engineered signaling polypeptide of the one or more engineered signaling polypeptides, is a chimeric antigen receptor (CAR), and
[0612] b) nucleic acids encoding an anti-idiotype polypeptide comprising an anti-idiotype extracellular recognition domain, a membrane association domain, and a stalk that connects the anti-idiotype extracellular recognition domain to the membrane association domain, wherein the anti-idiotype extracellular recognition domain comprises an idiotype-binding variable region of an anti-idiotype antibody or antibody mimetic that recognizes the idiotype of a target antibody or a target antibody mimetic.

[0613] In some aspects, provided herein is a modified cell, which can be an isolated cell, and in illustrative embodiments is a mammalian cell, such as a human cell for example, comprising any of the polynucleotides disclosed herein, and in illustrative embodiments expressing the polynucleotides. In illustrative embodiments, the polynucleotide comprises nucleic acids encoding an anti-idiotype polypeptide. Such anti-idiotype polypeptide can be according to any anti-idiotype polypeptide embodiment provided herein. In some embodiments, the cell is a primary cell. In some embodiments, the cell is not from a cell line. In some embodiments, the cell is not an immortalized cell. A some embodiments, the cell is not an immortalized cell. In some embodiments, the cell is an ex-vivo cultured cell. In some embodiments, the cell is a type of cell or a type of lymphocyte that in its native form does not produce antibodies. In some embodiments, the cell is a TIL. In some embodiments, the cell is a T cell or an NK cell, a CAR-T cell, or a CAR-NK cell, or a population of T cells and/or NK cells, or a population of CAR-T cells and/or CAR-NK cells, or a population of any of the aforementioned cells in this paragraph and in throughout this disclosure. In some embodiments, the population of cells, such as human cells, are within a vessel for gene therapy or cell therapy, such as an infusion bag. In some embodiments at least 5%, 10%, 20%, 25%, 30%, 40%, 50%, 60%, 70%, or 75% of the modified cells of the population comprise the polynucleotide, and in illustrative embodiments express the anti-idiotype polypeptide. In some embodiments between 1%, 2%, 5%, 10%, 20%, or 25% on the low end of the range, and 50%, 60%, 70%, 75%, 80%, 90%, 95%, 99%, or 100% on the high end of the range of the modified cells of the population, comprise an anti-idiotype polynucleotide, and in illustrative embodiments express the anti-idiotypte polypeptide.

[0614] In some aspects, provided herein is a method for delivering to a subject, modified cells, typically mammalian cells, for example lymphocytes, primary cells, primary lymphocytes, lymphocytes that are of a type that do not naturally express an antibody, and in illustrative embodiments, T cells and/or NK cells, wherein the modified mammalian cells are modified to include any of the polynucleotides disclosed herein. In illustrative embodiments, the polynucleotide includes nucleic acids encoding an anti-idiotype polypeptide, and thus typically encodes an anti-id ERD. The method typically comprises administering the modified cells, e.g. T cells and/or NK cells, to the subject. In some embodiments, the methods are methods for treating a disorder, such as a hyperproliferative disorder, for example cancer. In some embodiments, such methods further include instructing a user to deliver the target antibody or antibody mimetic to the subject if treatment for adverse events in the subject is warranted. For example, such instructions could indicate that treatment is warranted if a subject experiences grade 3 or grade 4 adverse events for cytokine release syndrome or IEC-associated neurotoxicity syndrome. In some embodiments, such methods further include administering the target antibody to the subject, for example after the subject develops adverse events, as provided herein. In some embodiments, the target antibody or the antibody mimetic is delivered in sufficient quantity to selectively kill at least 1%, 10%, 15%, 20%, 25%, 30%, 40%, 50%, 60%, 70%, 75%, 80%, 90%, 95%, or 99% of the genetically modified T cells and/or NK cells., thereby selectively killing the genetically modified T cells and/or NK cells. Such methods herein can be considered methods for selectively killing target modified cells.

[0615] In some aspects, provided herein is use of modified cells, in the manufacture of a kit, wherein the use of the kit comprises performing the method for delivering to the subject, or any of the methods disclosed herein. Especially contemplated for such use aspects, are any methods disclosed herein that involve delivering or administering modified cells to a subject.

[0616] In some aspects, provided herein is a polynucleotide vector comprising an anti-idiotype polynucleotide according to any aspect or embodiment herein. In some aspects, polynucleotides herein that include nucleic acids that encode an anti-idiotype polypeptide, comprise a promoter to drive expression of the nucleic acids encoding the anti-idiotype polypeptide. Tis promoter, or another promoter can be used to drive expression from other nucleic acids on the polynucleotide. In any of the aspects herein that are directed to, or include a promoter, the promoter can be a promoter active in mammalian cells, for example active in, or specifically active in lymphocytes. As another example, the promoter can be a promoter that is active in, or specifically active in T cells and/or NK cells.

[0617] In some embodiments of any of the polynucleotide or vector embodiments herein, the vector is a viral vector, and in further embodiments, is replication incompetent. In some embodiments, the viral vector is a retroviral particle. In some embodiments, the surface of the retroviral particle comprises a membrane-bound cytokine. In some embodiments, the membrane-bound cytokine is a chemokine. In some sub-embodiments, the vector comprises a cleavage signal effective for cleaving the membrane-bound cytokine from the membrane. In some embodiments, the retroviral particle is a lentiviral vector. In some embodiments, the viral vector further comprises an activation element on the surface of the retroviral particle, wherein the activation element is fused to a heterologous membrane attachment sequence, and wherein the activation element is a polypeptide capable of binding to CD3 or a nucleic acid (e.g.) aptamer capable of binding to CD3, on the surface of a resting T cell and activating the resting T cell, and wherein the activation element is not encoded by a polynucleotide in the retroviral particle. In some embodiments, the activation element comprises an anti-CD3 antibody or antibody mimetic. In some embodiments, the viral particle comprises a means on its surface for binding to CD3 on the surface of T cells.

[0618] In one aspect, provided herein is an anti-idiotype polypeptide, that is encoded by any of the polynucleotides provided herein that comprise nucleic acids encoding an anti-id ERD. In one aspect, provided herein is a polypeptide, comprising an extracellular recognition domain, a membrane association domain, and a stalk connecting the extracellular recognition domain to the membrane association domain, and further comprising an intracellular domain (ICD) of a first engineered signaling polypeptide, wherein the first engineered signaling polypeptide is a chimeric antigen receptor (CAR), a recombinant T cell receptor (TCR), or a lymphoproliferative element (LE), and wherein the extracellular recognition domain an anti-idiotype extracellular recognition domain that recognizes an idiotype of a target antibody.

[0619] In some non-limiting embodiments, an anti-idiotype polypeptide comprises an extracellular recognition domain, a membrane association domain, and a stalk connecting the extracellular recognition domain to the membrane association domain, and further comprising an intracellular domain of a first engineered signaling polypeptide, wherein the extracellular recognition domain comprises a domain that recognizes an idiotype of a target antibody. In some embodiments, the first engineered signaling polypeptide is a lymphoproliferative element (LE), a cytokine, a chimeric antigen receptor (CAR), and a recombinant T cell receptor (TCR).

[0620] In some non-limiting embodiments, an anti-idiotype polypeptide comprises an extracellular recognition domain, an intracellular domain, a membrane association domain, and a stalk connecting the extracellular recognition domain to the membrane association domain, wherein the extracellular recognition domain comprises a domain that recognizes an idiotype of a target antibody.

[0621] In illustrative embodiments of any aspect herein that includes an anti-idiotype extracellular recognition domain, the anti-idiotype extracellular recognition domain comprises an idiotype-binding variable region of an anti-idiotype antibody or an idiotype-binding region of an anti-idiotype antibody mimetic. In some embodiments, the anti-idiotype extracellular recognition domain is an antibody selected from a single-chain antibody, an Fab fragment, an Fab′ fragment, an (Fab′)2 fragment, an Fv fragment, an scFv, a divalent single-chain antibody, a diabody, an scFv-Fc, an scF-CH, an scFab, or an scFv-zipper. In certain illustrative embodiments, the anti-idiotype extracellular recognition domain is an antibody comprising an scFV. In some embodiments, the idiotype-binding variable regions comprise a framework region, and wherein the framework region is a human framework region.

[0622] In some embodiments of any of the aspects and embodiments herein that include a polynucleotide, including a polynucleotide vector, that includes nucleic acids encoding an anti-idiotype polypeptide that includes an ICD, or embodiments directed to the polypeptide encoded by such nucleic acids, or a cell that includes and optionally expresses the polynucleotides, the polynucleotide further encodes a second engineered signaling polypeptide, which in certain illustrative embodiments is a lymphoproliferative element. In some embodiments, the lymphoproliferative element comprises an intracellular domain that is a means for transmitting a signal that promotes proliferation or survival of a T cell and/or NK cell. In some embodiments, the lymphoproliferative element is constitutively active. In some embodiments, the polynucleotide comprises an internal ribosome entry site (IRES), a ribosomal skip sequence and/or cleavage signal, between nucleic acids encoding the first engineered signaling polypeptide or the second engineered signaling polypeptide, and nucleic acids encoding the anti-idiotype polypeptide. In some embodiments, the polynucleotide comprises an internal ribosome entry site (IRES), a ribosomal skip sequence and/or cleavage signal, between nucleic acids encoding the second engineered signaling polypeptide, and nucleic acids encoding the anti-idiotype polypeptide.

[0623] In some embodiments that include a polynucleotide that includes nucleic acids that encode an anti-idiotype polypeptide, a CAR and an LE, the anti-idiotype polypeptide, the CAR, and the LE can be expressed as one, two, or three separate polypeptides.

[0624] In some embodiments for any aspect herein that include an anti-Id ERD, the target antibody or antibody mimetic that is recognized by the anti-id ERD is a clinical antibody or clinical antibody mimetic that is the subject of an FDA-approved Investigational New Drug Application (IND), or equivalent approved regulatory filing for initial clinical testing in humans in another country or jurisdiction. In some embodiments for any aspect herein, the target antibody or antibody mimetic that is recognized by the anti-id ERD is a therapeutic antibody or a therapeutic antibody mimetic, respectively. In some embodiments for any of these embodiments, as per the IND or equivalent is a stand-alone product, with no other active therapeutic or ingredient being tested as part of the IND. In some embodiments for any aspect herein, the target antibody or antibody mimetic that is recognized by the anti-id ERD has been shown in one or more clinical trials to have an acceptable safety (i.e. adverse event) profile. In some embodiments for any aspect herein, the target antibody or antibody mimetic that is recognized by the anti-id ERD is a clinical antibody or clinical antibody mimetic that has passed human clinical safety testing in a stand-alone clinical trial of the clinical antibody or antibody mimetic. In some embodiments for any aspect herein, the target antibody or antibody mimetic that is recognized by the anti-id ERD is a clinical antibody or antibody mimetic for which a stand-alone application for regulatory approval has been filed with the Food And Drug Administration of the U.S. (USFDA), European Medicines Agency (EMA), National Medical Products Administration of China (NMPA) (Chinese FDA), or the Pharmaceutical and Food Safety Bureau (PFSB) of Japan. In some embodiments for any aspect herein, the target antibody or antibody mimetic that is recognized by the anti-id ERD is a clinical antibody or antibody mimetic for which an application for approval (e.g. Biologic License Application (BLA)) has been filed with the Food And Drug Administration of the U.S. (USFDA), European Medicines Agency (EMA), National Medical Products Administration of China (NMPA) (Chinese FDA), or the Pharmaceutical and Food Safety Bureau (PFSB) of Japan. In some illustrative embodiments, the target antibody or target antibody mimetic is an approved biologic antibody or antibody mimetic, approved by the Food And Drug Administration of the U.S. (USFDA), European Medicines Agency (EMA), National Medical Products Administration of China (NMPA) (Chinese FDA), or the Pharmaceutical and Food Safety Bureau (PFSB) of Japan. In some embodiments, the approved biologic antibody or antibody mimetic is the approved biologic antibody, and wherein the approved biologic antibody is cetuximab, muromonab-CD3, efalizumab, tositumomab-i131, nebacumab, edrecolomab, catumaxomab, daclizumab, olaratumab, abciximab, rituximab, basiliximab, palivizumab, infliximab, trastuzumab, adalimumab, ibritumomab tiuxetan, omalizumab, bevacizumab, natalizumab, panitumumab, ranibizumab, eculizumab, certolizumab pegol, ustekinumab, canakinumab, golimumab, ofatumumab, tocilizumab, denosumab, belimumab, ipilimumab, brentuximab vedotin, pertuzumab, ado-trastuzumab emtansine, raxibacumab, obinutuzumab, siltuximab, ramucirumab, vedolizumab, nivolumab, pembrolizumab, blinatumomab, alemtuzumab, evolocumab, idarucizumab, necitumumab, dinutuximab, secukinumab, mepolizumab, alirocumab, daratumumab, elotuzumab, ixekizumab, reslizumab, bezlotoxumab, atezolizumab, obiltoxaximab, brodalumab, dupilumab, inotuzumab ozogamicin, guselkumab, sarilumab, avelumab, emicizumab, ocrelizumab, benralizumab, durvalumab, gemtuzumab ozogamicin, erenumab (erenumab-aooe), galcanezumab (galcanezumab-gnlm), burosumab (burosumab-twza), lanadelumab (lanadelumab-flyo), mogamulizumab (mogamulizumabkpkc), tildrakizumab (tildrakizumab-asmn), fremanezumab (fremanezumab-vfrm), ravulizumab (ravulizumab-cwvz), cemiplimab (cemiplimab-rwlc), ibalizumab (ibalizumab-uiyk) emapalumab (emapalumab-lzsg), moxetumomab pasudotox (moxetumomab pasudotox-tdfk), caplacizumab (caplacizumab-yhdp), risankizumab (risankizumab-rzaa), polatuzumab vedotin (polatuzumab vedotinpiiq), romosozumab (romosozumab-aqqg), brolucizumab (brolucizumab-dbll), crizanlizumab (crizanlizumab-tmca), enfortumab vedotin (enfortumab vedotin-ejfv), [fam-]trastuzumab deruxtecan (fam-trastuzumab deruxtecan-nxki), teprotumumab (teprotumumab-trbw), eptinezumab (eptinezumabjjmr), isatuximab (isatuximab-irfc), sacituzumab govitecan (sacituzumab govitecan-hziy), inebilizumab (inebilizumab-cdon), tafasitamab (tafasitamab-cxix), belantamab mafodotin (belantamab mafodotinblmf), satralizumab (satralizumab-mwge), atoltivimab, maftivimab, odesivimab-ebgn, naxitamab-gqgk, margetuximab-cmkb, ansuvimab-zykl, evinacumab, dostarlimab (dostarlimab-gxly), loncastuximab tesirine (loncastuximab tesirine-lpyl), amivantamab (amivantamab-vmjw), aducanumab (aducanumabavwa), tralokinumab, anifrolumab (anifrolumab-fnia), oportuzumab monatox, tisotumab vedotin, bimekizumab, narsoplimab, tezepelumab, sintilimab, inolimomb, balstilimab, ublituximab, toripalimab, omburtamab, penpulimab, tanezumab, faricimab, sutimlimab, teplizumab, and retifanlimab.

[0625] In some embodiments for any aspect herein that include an anti-Id ERD, the anti-idiotype polypeptide comprises a means for binding an idiotype of cetuximab. In some embodiments, the approved biologic antibody is cetuximab. In some embodiments, the anti-idiotype polypeptide is capable of binding to cetuximab, and the anti-id ERD comprises any of the sequences provided herein for such cetuximab anti-idiotype ERD. In some embodiments, the anti-idiotype polypeptide is capable of blocking binding of cetuximab to epidermal growth factor receptor. In some embodiments, the target antibody comprises an antigen-binding site, and the anti-idiotype polypeptide is capable of binding to the antigen-binding site of the target antibody.

[0626] In some embodiments of any of the aspects and embodiments herein that include a polynucleotide, including a polynucleotide vector, that includes nucleic acids encoding an anti-idiotype polypeptide, or embodiments directed to the polypeptide encoded by such nucleic acids, or a cell that includes and optionally expresses the polynucleotides, the membrane association domain is a Gpi anchor.

[0627] In some embodiments of any of the aspects and embodiments herein that include a polynucleotide, including a polynucleotide vector, that includes nucleic acids encoding an anti-idiotype polypeptide, or embodiments directed to the polypeptide encoded by such nucleic acids, or a cell that includes and optionally expresses the polynucleotides, the anti-idiotype polypeptide further comprises one or more intracellular domains (ICD). In some embodiments, the ICD is between 1 and 35 amino acids in length. In some embodiments, the ICD is between 10 and 250 amino acids in length.

[0628] In some exemplary embodiments the ICD has primarily or exclusively a structural function, and/or in related embodiments does not comprise a signaling domain, or does not comprise a proliferation, survival, and/or apoptotic signaling domain. In some exemplary embodiments the ICD comprises a signaling domain, which in illustrative embodiments is a proliferation, survival, and/or apoptotic signaling domain.

[0629] In some embodiments and subembodiments wherein the anti-Idiotype polypeptide comprises an ICD, the membrane association domain is a transmembrane domain. The combination of stalk (sometimes referred to as a hinge), transmembrane domain, and ICD can be referred to herein as a STMICD. In some embodiments, the STMICD of an anti-idiotype polypeptide comprises the stalk, TM and 8 amino acids of the ICD of PDGFRβ and comprises a sequence as provided in SEQ ID NO: 676. In some embodiments, the STMICD of an anti-idiotype polypeptide comprised the stalk, TM and 9 amino acids of the ICD of CD28 and comprises the sequence provided in SEQ ID NO: 677. In some embodiments, the STMICD of an anti-idiotype polypeptide comprises the hinge, TM and the full ICD of CD28 and comprises the seuquence provided in SEQ ID NO: 678. In some embodiments, the STMICD of an anti-idiotype polypeptide comprises the hinge, TM, and full ICD of CD28 fused to the full ICD of CD80 and comprises the sequence provided in SEQ ID NO: 679.

[0630] In some embodiments, in illustrative embodiments wherein the membrane association domain is a transmembrane domain, the ICD is the ICD of an LE, and in further illustrative embodiments of these embodiments, the transmembrane domain is from an LE. In some embodiments, the ICD comprises all or part of an intracellular signaling domain of one or more cytokine receptors, and wherein the ICD is capable of activating a signaling pathway. In some embodiments, the inducible lymphoproliferative element is capable of activating a proliferative or survival signaling after binding of the anti-idiotype polypeptide to the target antibody or target antibody mimetic. In some embodiments, the ICD is capable upon dimerization, of activating a Jak/Stat pathway, a TRAF pathway, a PI3K pathway, and/or a PLC pathway. In some embodiments, the one or more cytokine receptors are selected from CD27, CD40, CRLF2, CSF2RA, CSF2RB, CSF3R, EPOR, GHR, IFNAR1, IFNAR2, IFNGR1, IFNGR2, IFNLR1, IL1R1, IL1RAP, IL1RL1, IL1RL2, IL2R, IL2RA, IL2RB, IL2RG, IL3RA, IL4R, IL5RA, IL6R, IL6ST, IL7R, IL7RA, IL9R, IL10RA, IL10RB, IL11RA, IL12RB1, IL13R, IL13RA1, IL13RA2, IL15R, IL15RA, IL17RA, IL17RB, IL17RC, IL17RE, IL18R1, IL18RAP, IL20RA, IL20RB, IL21R, IL22RA1, IL23R, IL27R, IL27RA, IL31RA, LEPR, LIFR, MPL, OSMR, PRLR, TGFβR, TGFβ decoy receptor, TNFRSF4, TNFRSF8, TNFRSF9, TNFRSF14, or TNFRSF18.

[0631] In some embodiments of any of the aspects and embodiments herein that include a polynucleotide, including a polynucleotide vector, that includes nucleic acids encoding an anti-idiotype polypeptide, or embodiments directed to the polypeptide encoded by such nucleic acids, or a cell that includes and optionally expresses the polynucleotides, the membrane association domain is the transmembrane domain of the lymphoproliferative element, the CAR, or the recombinant TCR. In some embodiments of any aspect herein, the transmembrane domain is from BAFFR, C3Z, CEACAM1, CD2, CD3A, CD3B, CD3D, CD3E, CD3G, CD3Z, CD4, CD5, CD7, CD8A, CD8B, CD9, CD11A, CD11B, CD11C, CD11D, CD27, CD16, CD18, CD19, CD22, CD28, CD29, CD33, CD37, CD40, CD45, CD49A, CD49D, CD49F, CD64, CD79A, CD79B, CD80, CD84, CD86, CD96 (Tactile), CD100 (SEMA4D), CD103, C134, CD137, CD154, CD160 (BY55), CD162 (SELPLG), CD226 (DNAM1), CD229 (Ly9), CD247, CRLF2, CRTAM, CSF2RA, CSF2RB, CSF3R, EPOR, FCER1G, FCGR2C, FCGRA2, GHR, HVEM (LIGHTR), IA4, ICOS, IFNAR1, IFNAR2, IFNGR1, IFNGR2, IFNLR1, IL1R1, IL1RAP, IL1RL1, IL1RL2, IL2RA, IL2RB, IL2RG, IL3RA, IL4R, IL5RA, IL6R, IL6ST, IL7RA, IL7RA Ins PPCL, IL9R, IL10RA, IL10RB, IL11RA, IL12RB1, IL12RB2, IL13RA1, IL13RA2, IL15RA, IL17RA, IL17RB, IL17RC, IL17RD, IL17RE, IL18R1, IL18RAP, IL20RA, IL20RB, IL21R, IL22RA1, IL23R, IL27RA, IL31RA, ITGA1, ITGA4, ITGA6, ITGAD, ITGAE, ITGAL, ITGAM, ITGAX, ITGB1, ITGB2, ITGB7, KIRDS2, LEPR, LFA-1 (CD11a, CD18), LIFR, LTBR, MPL, NKp80 (KLRF1), OSMR, PAG/Cbp, PRLR, PSGL1, SLAM (SLAMF1, CD150, IPO-3), SLAMF4 (CD244, 2B4), SLAMF6 (NTB-A, Ly108), SLAMF7, SLAMF8 (BLAME), TNFR2, TNFRSF4, TNFRSF8, TNFRSF9, TNFRSF14, TNFRSF18, VLA1, or VLA-6, or functional mutants and/or fragments thereof. In some embodiments of any aspect herein, the transmembrane domain comprises a polypeptide sequence with at least 50%, 60%, 70%, 75%, 80%, 85%, 90%, 95%, 96%, 97%, 98%, 99% or 100% sequence identity to a stretch of at least 10, 15, 20, or all of the amino acids of one or more of the following: CD8 alpha TM (SEQ ID NO:17); CD8 beta TM (SEQ ID NO:18); CD4 stalk (SEQ ID NO:19); CD3Z TM (SEQ ID NO:20); CD28 TM (SEQ ID NO:21); CD134 (OX40) TM: (SEQ ID NO:22); CD7 TM (SEQ ID NO:23); CD8 stalk and TM (SEQ ID NO:24); and CD28 stalk and TM (SEQ ID NO:25). In some embodiments of any aspect herein, the transmembrane domain is derived from an antibody. In some embodiments of any aspect herein, the transmembrane domain is at least 75, 80, 85, 90, 95, or 100% identical to the transmembrane domain of IgD. In some embodiments of this embodiment, the polynucleotide further comprises a stretch of at least 24, 48, 60, or 99 nucleotides encoding all or a fragment of IgA and IgB. In some subembodiments, of the embodiments above, the transmembrane domain is at least 75, 80, 90, 95, or 100% identical to the transmembrane domain from IgD.

[0632] In some embodiments of any of the aspects and embodiments herein that include a polynucleotide, including a polynucleotide vector, that includes nucleic acids encoding an anti-idiotype polypeptide, or embodiments directed to the polypeptide encoded by such nucleic acids, or a cell that includes and optionally expresses the polynucleotides, the of the anti-idiotype polypeptide is between 4 and 250, 4 and 200, or 4 and 100 amino acids in length. In some embodiments of any aspect herein, the stalk domain comprises a polypeptide sequence with at least 85%, 90%, 95%, 96%, 97%, 98%, 99% or 100% sequence identity to a stretch of at least 10, 15, 20, or all of the amino acids of one or more of the following amino acid sequences: TTTPAPRPPTPAPTIASQPLSLRPEACRPAAGGAVHTRGLDFA (SEQ ID NO:2), FCKIEVMYPPPYLDNEKSNGTIIHVKGKHLCPSPLFPGPSKP (SEQ ID NO:3), CPPC (SEQ ID NO:4), DKTHT (SEQ ID NO:5); CPEPKSCDTPPPCPR (SEQ ID NO:6), ELKTPLGDTTHT (SEQ ID NO:7), KSCDKTHTCP (SEQ ID NO:8), KCCVDCP (SEQ ID NO:9), KYGPPCP (SEQ ID NO:10), EPKSCDKTHTCPPCP (SEQ ID NO:11), ERKCCVECPPCP (SEQ ID NO:12), ELKTPLGDTTHTCPRCP (SEQ ID NO:13), SPNMVPHAHHAQ (SEQ ID NO:14), EPKSCDKTYTCPPCP (SEQ ID NO:15), TTTPAPRPPTPAPTIASQPLSLRPEACRPAAGGAVHTRGLDFACD (SEQ ID NO:16).

[0633] In some embodiments of any aspect herein, the stalk domain is derived from an antibody. In some embodiments, the stalk domain comprises a heavy chain Fc domain. In some embodiments, the stalk domain encodes a dimerizing moiety, wherein the dimerizing moiety is constitutively dimerized. In some embodiments, the constitutively dimerized, dimerization domain comprises a leucine zipper.

[0634] In some embodiments of any of the aspects and embodiments herein that include a polynucleotide, including a polynucleotide vector, that includes nucleic acids encoding an anti-idiotype polypeptide, or embodiments directed to the polypeptide encoded by such nucleic acids, or a cell that includes and optionally expresses the polynucleotides, a polynucleotide herein that includes nucleic acids that encode and anti-id ERD furthermore includes nucleic acids that encode one or more inhibitory RNA molecules. In some embodiments, the one or more inhibitory RNA molecules reduce cytokine release syndrome or enhance proliferation. In some embodiments, the one of the one or more inhibitory RNA molecules targets IFN gamma.

[0635] In some embodiments of any of the aspects and embodiments herein that include a polynucleotide, including a polynucleotide vector, that includes nucleic acids encoding an anti-idiotype polypeptide, or embodiments directed to the polypeptide encoded by such nucleic acids, or a cell that includes and optionally expresses the polynucleotides, the target antibody is structured such that binding of the anti-idiotype polypeptide to the target antibody induces antibody-dependent cellular cytotoxicity. In some embodiments of any of the aspects and embodiments herein that include an anti-id ERD, or nucleic acids encoding the same, the target antibody is structured such that binding of the anti-idiotype polypeptide to the target antibody induces complement-dependent cytotoxicity. In some embodiments of any of the aspects and embodiments herein that include an anti-id ERD, or nucleic acids encoding the same, the target antibody is structured such that binding of the anti-idiotype polypeptide to the target antibody induces opsonization. In some embodiments of any of the aspects and embodiments herein that include an anti-id ERD, or nucleic acids encoding the same, the target antibody is structured such that binding of the anti-idiotype polypeptide to the target antibody does not induce antibody-dependent cellular cytotoxicity.

[0636] In some embodiments of any of the aspects and embodiments herein that include a polynucleotide, including a polynucleotide vector, that includes nucleic acids encoding an anti-idiotype polypeptide that includes an ICD, or embodiments directed to the polypeptide encoded by such nucleic acids, or a cell that includes and optionally expresses the polynucleotides, the ICD comprises an intracellular apoptosis domain capable of inducing or promoting or transmitting an apoptotic signal. In some subembodiments of these embodiments, the target antibody is not capable of, structured to, configured to, or adapted to induce cytotoxicity. In some subembodiments of these embodiments, the target antibody is capable of, structured to, configured to, or adapted to induce cytotoxicity.

[0637] In some embodiments of any of the aspects and embodiments herein that include a polynucleotide, including a polynucleotide vector, that includes nucleic acids encoding an anti-idiotype polypeptide that includes an ICD, or embodiments directed to the polypeptide encoded by such nucleic acids, or a cell that includes and optionally expresses the polynucleotides, the ICD comprises an intracellular apoptosis domain capable of inducing an apoptotic signal upon binding of the anti-idiotype extracellular recognition domain to a target antibody or antibody mimetic comprising the idiotype. In some subembodiments of these embodiments, the anti-idiotype polypeptide further comprises a proteolytic cleavage site as part of and/or between the transmembrane domain and the intracellular apoptosis domain, wherein the proteolytic cleavage site has a cleavage site amino acid sequence such that the anti-idiotype polypeptide is cleaved at the proteolytic cleavage site when the anti-idiotype polypeptide is dimerized by binding of a target antibody or antibody mimetic to the anti-idiotype extracellular recognition domain. In further subembodiments of these embodiments, the proteolytic cleavage site is effective for cleavage by a gamma-secretase complex or a Notch receptor upon dimerization of the anti-idiotype polypeptide. In further subembodiments of these embodiments, the proteolytic cleavage site is effective for cleavage by a gamma-secretase complex or a Notch receptor upon dimerization of the anti-idiotype polypeptide. In further subembodiments of these embodiments, the intracellular apoptosis domain comprises one or more of a Caspase 2 polypeptide, a Caspase 8 polypeptide, a Caspase 9 polypeptide, and a Caspase 10 polypeptide, wherein such intracellular apoptosis domain is capable of activating an effector caspase upon cleavage from the anti-idiotype polypeptide. In further subembodiments of these embodiments, the intracellular apoptosis domain comprises one or more caspase polypeptides, wherein the caspase polypeptides are amino acids 327 to 452 of SEQ ID NO:680 (Caspase 2), amino acids 384 to 496 of SEQ ID NO:681 (Caspase 8), amino acids 294 to 416 of SEQ ID NO:682 (Caspase 9), and amino acids 365 to 478 of SEQ ID NO:683 (Caspase 10). In further subembodiments of these embodiments, the intracellular apoptosis domain comprises one or more caspase polypeptides, wherein the caspase polypeptides are each a polypeptide that when dimerized has initiator caspase function and is at least 90% identical to amino acids 327 to 452 of SEQ ID NO:680 (Caspase 2), amino acids 384 to 496 of SEQ ID NO:681 (Caspase 8), amino acids 294 to 416 of SEQ ID NO:682 (Caspase 9), and amino acids 365 to 478 of SEQ ID NO:683 (Caspase 10).

[0638] In further subembodiments of these embodiments where the ICD comprises an intracellular apoptosis domain, including certain embodiments wherein the anti-idiotype polypeptide comprises a protease cleavage site, and other embodiments wherein the anti-idiotype polypeptide does not comprise a protease cleavage site, for example that is activated by binding of an anti-id ERD to a target antibody, the ICD comprises one or more caspase activation and recruitment domains (CARDs), death domains (DDs), death effector domains (DEDs), pyrin domains (PYDs), and/or caspase proteolytic domains that are activate to transmit an apoptosis-inducing signal upon dimerization. For example, these domains could be from a caspase, for example an initiator caspase, for example caspase 2, 8, 9, or 10. In some subembodiments of these embodiments, the one or more CARDS, DDs, DEDs, PYDs, and/or caspase proteolytic domains comprises one or more CARDs from Apaf-1, DARK, CED-4, CED-3, Dronc, CARMA1, Bcl-10, Nod1, Nod2, RIP2, ICEBERG, RIG-I, MDA5, MAV5, ASC, NALP1, caspase 1, caspase 2, caspase-5, and/or caspase 9. In some subembodiments of these embodiments, the intracellular apoptotic domain can include one or more DDs from TNF-R1, Fas, p75, TRADD, FADD, RIP, MyD88, IRAKs, Pelle, Tube, PIDD, RAIDD, and/or MALT1, and/or functional fragments thereof. In some subembodiments of these embodiments, the intracellular apoptotic domain can include one or more DEDs from FADD, caspase 8, caspase 10, c-FLIP, v-FLIPs, MC159, PEA-15, DEDD, and/or DEDD2, and/or functional fragments thereof. In some subembodiments of these embodiments, the intracellular apoptotic domain can include one or more PYDs from ASC, ASC2, NALP1, NALP1, NALP3, NALP4, NALP5, NALP6, NALP7, NALP8, NALP9, NALP10, NALP11, and/or NALP12, and/or functional fragments thereof.

[0639] In some embodiments of any of the aspects and embodiments herein that include a polynucleotide, including a polynucleotide vector, that includes nucleic acids encoding an anti-idiotype polypeptide that includes an ICD, or embodiments directed to the polypeptide encoded by such nucleic acids, or a cell that includes and optionally expresses the polynucleotides, the ICD comprises a dimerizing moiety, wherein the dimerizing moiety is constitutively dimerized, and/or wherein the target antibody is an IgM antibody. In some subembodiments of these embodiments and the other embodiments herein wherein the ICD comprises an apoptosis domain, the intracellular apoptosis domain comprises one or more death domains (DD) from FAS, TNF-R1, DR3, DR4, and/or DR5.

[0640] In some embodiments of any of the aspects and embodiments herein that include a polynucleotide, including a polynucleotide vector, that includes nucleic acids encoding an anti-idiotype polypeptide that includes an ICD, or embodiments directed to the polypeptide encoded by such nucleic acids, or a cell that includes and optionally expresses the polynucleotides, wherein the membrane association domain is a transmembrane domain, the transmembrane domain is the transmembrane domain of the CAR and the ICD is the ICD of a CAR. In some subembodiments of these and other embodiments, the CAR is a bispecific CAR, wherein one ASTR of the CAR comprises the anti-idiotype extracellular recognition domain. In some subembodiments of these and other embodiments, another ASTR of the CAR is capable of binding to a tumor-associated antigen or tumor-specific antigen. In some subembodiments of these and other embodiments, the one ASTR and the other ASTR of the CAR are scFV antibodies. In some subembodiments of these and other embodiments, the one ASTR and the other ASTR of the CAR are scFV antibodies. the one ASTR and the other ASTR of the CAR comprise an scFv-FC, scFv-CH, and scFv-zipper antibody.

[0641] In one aspect, provided herein is a retroviral particle, comprising:
[0642] a) a polynucleotide comprising nucleic acids encoding an anti-idiotype polypeptide comprising an anti-idiotype extracellular recognition domain, a membrane association domain, and a stalk that connects the anti-idiotype extracellular recognition domain to the membrane association domain, wherein the anti-idiotype extracellular recognition domain comprises an idiotype-binding variable region of an anti-idiotype antibody or antibody mimetic that recognizes the idiotype of a target antibody or a target antibody mimetic; and
[0643] b) an activation element on the surface of the retroviral particle, wherein the activation element is fused to a heterologous membrane attachment sequence, and wherein the activation element is a polypeptide capable of binding to CD3 on the surface of a resting T cell and activating the resting T cell, and is not encoded by a polynucleotide in the retroviral particle.

[0644] In some embodiments of any aspect or embodiment herein that includes an anti-id ERD or a polynucleotide with nucleic acids encoding the same, the idiotype is present on two target antibodies, a first target antibody, which promotes cytotoxicity, and a second target antibody, which promote less cytotoxicity than the first target antibody. In some embodiments wherein the idiotype is present on two target antibodies, the two target antibodies differ in their glycosylation patterns. In some embodiments, including embodiments wherein the idiotype is present on two target antibodies, the target antibody, or one or both of the target antibodies comprises glycosylated residues. In some embodiments of any aspect herein, the idiotype recognized by the anti-id ERD comprises glycosylated residues. In some embodiments, including embodiments wherein the idiotype is present on two target antibodies, the target antibody or one or both of the target antibodies comprises an α-Gal epitope. In some embodiments, including embodiments wherein the idiotype is present on two target antibodies, the target antibody comprises one or more glycoforms, or the target antibodies are different glycoforms. In some embodiments, the glycoforms comprise the target antibody with an α-1,3-Gal residue. In some embodiments, the glycoforms comprise the target antibody with an N-glycolylneuraminic acid residue. In some embodiments, the glycoforms comprise the target antibody with an oligomannose.

[0645] In some embodiments, the target antibody is produced by a cell line such that the target antibody is glycosylated. In some embodiments, including embodiments wherein the idiotype is present on two target antibodies,,the target antibody is produced in SP2/0 cells, and/or the two target antibodies are made in different cell lines. In some embodiments, including embodiments wherein the idiotype is present on two target antibodies, the target antibody is produced in NS0 cells and the second target antibody is made in a different cell line. In some embodiments, including embodiments wherein the idiotype is present on two target antibodies, the target antibody is produced in Chinese hamster ovary (CHO) cells and the second target antibody is made in a different cell line.

[0646] In one aspect, provided herein is a method for delivering modified T cells and/or NK cells to a subject, the method comprising administering the modified cells to the subject, wherein the modified cells are modified with a polynucleotide comprising nucleic acids encoding an anti-idiotype polypeptide and nucleic acids encoding a CAR.

[0647] In one aspect, provided herein is use of modified T cells and/or NK cells in the manufacture of a kit, wherein the use of the kit comprises: administering the modified T cells and/or NK cells to a subject, wherein the modified T cells and/or NK cells comprise a polynucleotide comprising nucleic acids encoding an anti-idiotype polypeptide and nucleic acids encoding a CAR.

[0648] In one aspect, provided herein is a population of modified cells, in illustrative embodiments modified T cells and/or NK cells, wherein at least some modified cells of the population of cells comprise a polynucleotide comprising nucleic acids encoding an anti-idiotype polypeptide and nucleic acids encoding a CAR.

[0649] In one illustrative embodiment, provided herein is a population of modified cells, in illustrative embodiments modified T cells and/or NK cells, wherein at least some of the modified cells of the population of modified cells comprise a polynucleotide comprising nucleic acids encoding an anti-idiotype polypeptide, and in illustrative embodiments express the anti-idiotype polypeptide. In some embodiments of this illustrative embodiment, and other embodiments herein that include a population of cells, at least 5%, 10%, 20%, 25%, 30%, 40%, 50%, 60%, 70%, or 75% of the modified cells of the population comprise the polynucleotide, and in illustrative embodiments express the anti-idiotype polypeptide. In some embodiments between 1%, 2%, 5%, 10%, 20%, or 25% on the low end of the range, and 50%, 60%, 70%, 75%, 80%, 90%, 95%, 99%, or 100% on the high end of the range of the modified cells of the population, comprise the polynucleotide, and in illustrative embodiments express the anti-idiotypte polypeptide. In some embodiments of this illustrative embodiment, and any other embodiment herein, the modified cells of the population are primary cells, ex-vivo cultured cells, not cells derived from a cell line, and/or not immortalized cells. In some exemplary embodiments of this illustrative embodiment, the anti-idiotype polypeptide comprises a membrane association domain, which in some illustrative embodiments is a transmembrane domain.

[0650] In some exemplary embodiments of the illustrative embodiment immediately above, and any other embodiment or aspect herein, the anti-idiotype polypeptide lacks an intracellular domain (ICD). In some exemplary embodiments of the illustrative embodiment immediately above, and any other embodiment or aspect herein, the anti-idiotype polypeptide comprises an ICD. In some exemplary embodiments the ICD has primarily or exclusively a structural function, and/or in related embodiments does not comprise a signaling domain, or does not comprise a proliferation, survival, and/or apoptotic signaling domain. In some exemplary embodiments the ICD comprises a signaling domain, which in illustrative embodiments is a proliferation, survival, and/or apoptotic signaling domain. The anti-idiotype polypeptides and polypeptides that comprise nucleic acids encoding the same, themselves represent separate illustrative embodiments herein, regardless of whether they are within a cell or not within a cell.

[0651] In one aspect, provided herein is a polypeptide, or polynucleotide with nucleic acids encoding the same, comprising a lymphoproliferative element according to any embodiment herein, wherein the extracellular domain comprises an anti-id ERD. In one aspect, provided herein is a polypeptide, or polynucleotide with nucleic acids encoding the same, comprising a chimeric antigen receptor according to any embodiment herein, wherein an ASTR of the CAR comprises an anti-id ERD.

[0652] The inventors have observed that delivery of modified T cells and/or NK cells subcatenously can form subcutaneous lymphoid structures. Accordingly, in another aspect, provided herein is a subcutaneous lymphoid structure, which can be considered a tertiary lymphoid structure, that comprises at least some of the modified lymphocytes of a population of modified lymphocytes, and in illustrative embodiments, genetically modified lymphocytes, that include a polynucleotide comprising nucleic acids encoding an anti-idiotype polypeptide and typically one or more of a CAR or a TCR, and in illustrative embodiments one or more of an LE or a cytokine. In some embodiments, some of the genetically modified lymphocytes expressing the CAR are located in lymphatic vasculature. In some embodiments, the other white blood cells comprise B cells, macrophages, dendritic cells, T cells and/or NK cells. In some embodiments, some of the modified lymphocytes of the population are in lymphatic vasculature localized near, in certain embodiments within 25, 50, 75, 100, 125, 150, 200, 250, 500, or 1,000 µm from, the subcutaneous lymphoid structure. In some embodiments, the subcutaneous lymphoid structure or the population of genetically modified lymphocytes further comprises actively dividing lymphocytes that are native to the subject and do not express the CAR. In some embodiments, the genetically modified lymphocytes express a lymphoproliferative element. In some embodiments, the subcutaneous lymphoid structure is an artificial lymph node. In some embodiments, the population of genetically modified lymphocytes is in an artificial lymph node.

[0653] In some embodiments, the T cells comprises CD4+ and CD8+ cells, and wherein at least 50% of the genetically modified lymphocytes that are CD4+ and/or CD8+ are CD3-;

[0654] In some embodiments of any of the population of genetically modified lymphocytes aspects or embodiments herein,
[0655] i) the population of genetically modified lymphocytes comprises a persisting population of genetically modified lymphocytes expressing the transgene, the engineered T cell receptor, or the chimeric antigen receptor (CAR), that persists in the subject for at least 7, 14, 21, or 28 days or 1, 2, 3, 4, 5, 6, 7, 8, 9, 10, 11, or 12 months or 1, 2, 3, 4, or 5 years after administration.
[0656] ii) the genetically modified lymphocytes produce a population of progeny lymphocytes, wherein the population of progeny lymphocytes comprises at least 1 × 10⁵, 1 × 10⁶, 1 × 10⁷, 1 × 10⁸,1 × 10°, 1 × 10¹⁰, or 1 × 10¹¹, or between 1 × 10⁶ and 1 × 10¹⁰, or between 1 × 10⁸ and 1 × 10¹² cells;
[0657] iii) the population of genetically modified lymphocytes comprises at least 100 genetically modified lymphocytes localized subcutaneously and the subcutaneous region contains no artificial matrix components; and/or
[0658] iv) the at least 10 genetically modified lymphocytes of the population remain localized subcutaneously for at least 7, 14, 21, or 28 days, and in illustrative embodiments, the subcutaneous region contains no artificial matrix components.

[0659] In some embodiments, at least 1 × 10⁵, 1 × 10⁶, 1 × 10⁷, 1 × 10⁸,1 × 10⁹, 1 × 10¹⁰, or 1 × 10¹¹, or between 1 × 10⁶ and 1 × 10¹⁰, or between 1 × 10⁸ and 1 × 10¹² cells of the genetically modified lymphocytes are located subcutaneously. In some embodiments, at least 1 × 10⁵, 1 × 10⁶, 1 × 10⁷, 1 × 10⁸,1 × 10⁹, 1 × 10¹⁰, ort 1 × 10¹¹, or between 1 × 10⁶ and 1 × 10¹⁰, or between 1 × 10⁸ and 1 × 10¹² cells are not in the subcutaneous region, and in illustrative embodiments are circulating in the blood and/or at the site of a tumor in the subject.

[0660] In one aspect, provided herein is a subcutaneous lymphoid structure, comprising: cell aggregates, wherein the cell aggregates comprise:
[0661] a) at least 10, 100, 1 × 10³, 1 × 10⁴, 1 × 10⁵, 1 × 10⁶, 1 × 10⁷, 1 × 10⁸,1 × 10⁹, 1 × 10¹⁰, or 1 × 10¹¹ genetically modified lymphocytes expressing an anti-idiotype polypeptide, in illustrative embodiments and antigen, an engineered T cell receptor, or a chimeric antigen receptor (CAR), wherein the cell aggregates are localized subcutaneously in a subject, and wherein the genetically modified lymphocytes comprise T cells and/or NK cells; and
[0662] b) other white blood cells that do not express the CAR, wherein at least 10% of the cells in the cell aggregates are other white blood cells.

[0663] In any of the aspects provided herein that include intramuscular, and in illustrative embodiments subcutaneous administration of modified lymphocytes (e.g. modified T cells and/or NK cells), such method can in certain embodiments, include a step wherein the modified cells expand subcutaneously (e.g. expanding the modified cells subcutaneously), for example at or near (e.g. within 10, 5, 4, 3, 2, or 1 cm) a site of subcutaneous administration, for days (e.g., for up to 5, 7, 14, 17, 21, or 28 days) or months (e.g., for up to 1, 2, 3, 6, 12, or 24 months). In some embodiments of aspects herein that include intraperitoneal, intramuscular, and in illustrative embodiments subcutaneous administration of modified T cells and/or NK cells, or RIPs to modify T cells and/or NK cells in vivo, the modified T cells and/or NK cells (e.g., genetically modified T cells and/or NK cells) migrate away from the site of subcutaneous administration to other sites of the body, for example to tumors. Thus, in some embodiments modified and in illustrative embodiments, such methods can include a step wherein genetically modified T cells and/or NK cells appear in circulation migrating away from a subcutaneous administration site, days (e.g., 1, 2, 3, 4, 5, 6, or 7 days), weeks (e.g., 1, 2, 4, or 4 weeks), or months (e.g., 1, 2, 3, 6, 12, or 24 months) after the modified T cells are injected intraperitoneally, intramuscularly, or in illustrative embodiments subcutaneously into a subject. In certain embodiments, at these timepoints, such methods can include a step wherein an area, or in illustrative embodiments a concentration gradient of modified, and in illustrative embodiments genetically modified, T cells and/or NK cells forms emanating from the site of intramuscular, or in illustrative embodiments subcutaneous administration.

[0664] In any of the aspects provided herein that include intraperitoneal, intramuscular, and in illustrative embodiments subcutaneous administration of modified lymphocytes (e.g. modified T cells and/or NK cells), certain embodiments can include a step of delivery of another component(s) such as a molecule(s) (ion(s)), macromolecule(s) (e.g. DNA, RNA, peptides, and polypeptides) and/or other cell(s), such as other modified cell(s) (e.g. genetically modified cell(s)), that can affect the modified T cells and/or NK cells, subcutaneously at or near the site of delivery of the modified T cells and/or NK cells, in the same or a different formulation. In certain illustrative embodiments, the other component(s) include an antigen, a recombinant cell encoding a recombinant antigen, or an RNA encoding the antigen, or a cytokine that drives proliferation of T cells and/or NK cells. These other components, which are disclosed in more detail herein, can be delivered either in the same formulation or in different formulation(s) than the modified T cells and/or NK cells. Furthermore, these other components can be delivered along with the modified T cells and/or NK cells or can be delivered days (e.g., 1, 2, 3, 4, 5, 6, or 7 days), weeks (e.g., 1, 2, 4, or 4 weeks), or even months (e.g., 1, 2, 3, 6, 12, or 24 months) before or after the modified T cells and/or NK cells are delivered. In some embodiments, one or more of these other components is delivered at more than one time point, such as on the same day as, or simultaneously with the modified T cells and/or NK cells, and at one or more of the times recited hereinabove in this paragraph. Accordingly, in some embodiments a second formulation is administered to the subject at a second timepoint between 1 day and 1 month, 2 months, 3 months, 6 months, or 12 months after the administering the cell formulation. The other component that is administered to the subject in addition to modified lymphocytes or substantially purified or purified RIPs, can include a cytokine, for example IL-2, ii) an antibody or polypeptide that is capable of binding CD2, CD3, CD28, OX40, 4-1BB, ICOS, CD9, CD53, CD63, CD81, and/or CD82, and/or iii) a source of the cognate antigen recognized by the CAR). In certain embodiments subcutaneous administration of the modified T cells and/or NK cells is performed near (e.g., within 1, 1, 2, 3, 4, 5, 10, 20, or 30 cm) a site of neoplastic (e.g., cancerous) cells, such as a tumor, or an organ comprising a tumor, including for example, the spleen in the case of blood cancers, or where multiple administrations are performed of the same formulation, or of different formulations, they can be performed at or near the site of a prior administration or away from such site. In some embodiments, the cell formulation comprises a source of a cognate antigen for the CAR, wherein the source of the cognate antigen is the cognate antigen, an mRNA encoding the cognate antigen, or a cell expressing the cognate antigen. In some embodiments, the cell formulation comprises a cytokine and wherein the cytokine is IL-2, IL-7, IL-15, or IL-21 or a modified version of any of these cytokines that is capable of binding to and activating a native receptor for the cytokine. The cognate antigen for this and any embodiments herein, including in this Exemplary Embodiments section, can be any of the tumor associated or tumor specific antigens provided herein.

[0665] Provided herein in one aspect is a cell formulation, comprising modified T cells and/or NK cells, wherein the modified T cells and/or NK cells are suspended in a delivery solution and are either or both:
[0666] i) genetically modified with a polynucleotide comprising one or more transcriptional units, wherein each of the one or more transcriptional units is operatively linked to a promoter active in T cells and/or NK cells, or
[0667] ii) associated with a RIP comprising the polynucleotide,

[0668] wherein the one or more transcriptional units encode an anti-idiotype polypeptide, and in illustrative embodiments a first polypeptide comprising a CAR, and wherein the cell formulation in illustrative embodiments is contained within a syringe, and has a volume of between 0.5 ml and 20 ml, or 2 ml and 10 ml, or another subcutaneous or intramuscular cell formulation volume provided herein, and further comprises at least one of, for example two or more of, neutrophils, B cells, monocytes, basophils, and eosinophils. In illustrative embodiments, the cell formulation is compatible with, effective for, and/or adapted for intramuscular delivery and in further illustrative embodiments subcutaneous delivery.

[0669] In some embodiments of any of the aspects that are or include a cell formulations herein, and any reaction mixture embodiments, especially that that include a subcutaneous, intramuscular reaction, or intraperitoneal reaction mixture, the cell formulation or the reaction mixture further comprises i) a cytokine, ii) an antibody, antibody mimetic, or polypeptide that is capable of binding CD3, CD28, OX40, 4-1BB, ICOS, CD9, CD53, CD63, CD81, and/or CD82, and/or iii) a source of the cognate antigen recognized by the CAR.

[0670] Additional cell formulation aspects and embodiments are provided below and in the Detailed Description herein, outside this Exemplary Embodiments section. Various volumes of cell formulations are provided herein for any cell formulation aspect. In some embodiments, the cell formulation is 3 ml or greater in volume, for example 3 ml to 600 ml in volume, or between 50 ml and 500 ml, or between 100 ml and 500 ml. In some embodiments, the cell formulation comprises hyaluronidase. In some embodiments, the cell formulation is 1 ml to 10 ml, 1 ml to 5 ml, 1 ml to 3 ml or 10, 5, 4, 3, or 2 ml or less, or less than 3 ml, or any of the Small Volume Elements provided herein. In illustrative embodiments, the cell formulation does not comprise hyaluronidase. Other volumes and formulations are provided herein. In some embodiments for any of the cell formulation aspects herein, the cell formulation is contained within a syringe. In some embodiments, the cell formulation, for any cell formulation provided herein, is in an incubation bag or a blood processing bag. In illustrative embodiments, the syringe is made using Good Manufacturing Practice (GMP) and is GMP grade and quality.

[0671] Provided herein in another aspect is a method for modifying, genetically modifying, and/or transducing a lymphocyte (e.g. a T cell or an NK cell) or a population thereof, comprising contacting blood cells comprising the lymphocyte (e.g. the T cell or NK cell) or the population thereof, ex vivo with a RIP comprising in its genome a polynucleotide comprising one or more nucleic acid sequences operatively linked to a promoter active in lymphocytes (e.g. T cells and/or NK cells), wherein a first nucleic acid sequence of the one or more nucleic acid sequences encodes an anti-idiotype polypeptide, and one or more of a CAR comprising an ASTR, a transmembrane domain, and an intracellular activating domain, one or more (e.g. two or more) inhibitory RNA molecules directed against one or more RNA targets, and a polypeptide lymphoproliferative element, wherein said contacting facilitates genetic modification and/or transduction of the lymphocyte (e.g. T cell or NK cell), or at least some of the lymphocytes (e.g. T cells and/or NK cells) by the RIP, thereby producing a modified, genetically modified, and/or transduced lymphocyte (e.g. T cell and/or NK cell). In such method, the contacting is typically performed in a reaction mixture, sometimes referred to herein as a transduction reaction mixture, comprising a population of lymphocytes (e.g., T cells and/or NK cells) and contacted with a population of RIPs. Various contacting times are provided herein, including, but not limited to, in this Exemplary Embodiments section, that can be used in this aspect to facilitate membrane association, and eventual membrane fusion of the lymphocytes (e.g., T cells and/or the NK cells) to the RIPs. In an illustrative embodiment, contacting is performed for less than 15 minutes. Provided herein in one aspect, is use of RIPs in the manufacture of a kit for modifying lymphocytes (e.g. T cells or NK cells) of a subject, wherein the use of the kit comprises the aspect disclosed above in this paragraph, and any relevant embodiments herein.

[0672] In some embodiments the method can further include introducing the modified T cell and/or NK cell into a subject. In illustrative embodiments, the blood cells comprising the lymphocyte (e.g., the T cell and/or NK cell) are from the subject, and thus the introducing is a reintroducing. In this aspect, in some embodiments, a population of lymphocytes (e.g., T cells and/or NK cells) are contacted in the contacting step, modified, genetically modified, and/or transduced, and introduced into the subject in the introducing step.

[0673] Provided herein in another aspect is the use of RIPs in the manufacture of a medicament for modifying lymphocytes, for example T cells and/or NK cells of a subject, wherein the use of the medicament comprises the method aspect provided hereinabove in this paragraph.

[0674] In another aspect, provided herein is kit for modifying NK cells and/or T cells, comprising:

[0675] one or a plurality of first containers containing polynucleotides, typically substantially pure polynucleotides (e.g., found within recombinant retroviral particles according to any embodiment herein), comprising a first transcriptional unit operatively linked to a promoter active in T cells and/or NK cells, wherein the first transcriptional unit encodes a first polypeptide comprising an anti-idiotype polypeptide, and one or more of a CAR; a cytokine and a lymphoproliferative element.

[0676] Provided in the following paragraphs, are exemplary aspects and embodiments that can be used in or combined with any aspect or embodiment provided herein unless incompatible with or otherwise indicated, as will be recognized by a skilled artisan. In another aspect, provided herein is a modified, in illustrative embodiments genetically modified, and in further illustrative embodiments stably transfected or stably transcribed lymphocyte(s) (e.g., T cell(s) or NK cell(s)) made by modifying lymphocytes (e.g., T cells and/or NK cells) according to any method herein.

[0677] In another aspect, provided herein is use of RIPs in a kit, or in the manufacture of a kit, for modifying T cells and/or NK cells of a subject, wherein the use of the kit comprises any of the methods for delivering cells or modifying T cells and/or NK cells provided herein. In another aspect, provided herein is use of a RIPs in a kit, or in the manufacture of a kit for delivering to a subject, administering to a subject, injecting into a subject, and/or engrafting in a subject, modified lymphocytes, wherein the use of the kit comprises any of the methods for delivering to a subject, administering to a subject, injecting into a subject, and/or engrafting in a subject, provided herein. In another aspect, provided herein is use of a RIPs in a kit, or in the manufacture of a kit for preparing a cell formulation, wherein the use of the kit comprises any of the methods for preparing a cell formulation comprising modifying T cells and/or NK cells provided herein. Provided herein in another aspect, are RIPs for use in subcutaneous delivery to a subject, wherein the use of the RIPs comprises any method provided herein, for subcutaneous delivery that comprises RIPs.

[0678] Provided in the following paragraphs, are exemplary embodiments, for example exemplary ranges and lists, that can be used for any of the aspects provided immediately above or otherwise herein, unless incompatible with or otherwise indicated, as will be recognized by a skilled artisan. Additional aspects and embodiments are provided in this specification outside this Exemplary Embodiments section.

[0679] In any of the aspects herein, the cell(s) or lymphocyte(s) is an NK cell(s) or in illustrative embodiments a T cell(s). It will be understood that in aspects that include collecting blood that such method can include collecting a blood-derived product or a peripheral blood-derived product, which can be a blood sample, such as an unfractionated blood sample, or can include blood cells (e.g., leukocytes or lymphocytes) collected by apheresis.

[0680] In any of the aspects herein that include a polynucleotide including one or more transcriptional units, the one or more transcriptional units can encode a polypeptide comprising an LE. In some embodiments, the extracellular domain of the LE is an anti-idiotype polypeptide. In some embodiments, the extracellular domain of the LE further comprises any of the dimerizing moieties disclosed herein, which in some embodiments can be considered a stalk domain. In some embodiments, the dimerizing motif can be a leucine zipper motif-containing polypeptide, CD69, CD71, CD72, CD96, Cd105, Cd161, Cd162, Cd249, CD271, or Cd324, as well as mutants and/or active fragments thereof that retain the ability to dimerize.

[0681] In some embodiments, the lymphoproliferative element comprises an intracellular signaling domain from a cytokine receptor, which in illustrative embodiments activates a Janus kinase/ Signal Transducer and Activator of Transcription (JAK/ STAT) pathway and/or a tumor necrosis factor receptor (TNF-R)-associated factor (TRAF) pathway. In illustrative embodiments, the lymphoproliferative element is constitutively active typically because it constitutively activates one or more signaling pathways. In illustrative embodiments, the lymphoproliferative element comprises Box1 and optionally Box2 JAK-binding motifs, and a STAT-binding motif comprising a tyrosine residue. In some illustrative embodiments, the lymphoproliferative element does not comprise an extracellular ligand binding domain or a small molecule binding domain. In some embodiments, the constitutively active signaling pathways include activation of PI3K pathways. In some embodiments, the constitutively active signaling pathways include activation of PLC pathways. Thus, in certain embodiments, lymphoproliferative elements for use in any of the kits, methods, uses, or compositions herein, are constitutively active and comprise an intracellular signaling domain that activates a Jak/Stat pathway a TRAF pathway, a PI3K pathway, and/or a PLC pathway. Any of the polypeptide lymphoproliferative elements disclosed herein, for example, but not limited to those disclosed in the “Lymphoproliferative elements” section herein, or functional mutants and/or fragments thereof, can be encoded. In some embodiments, the LE comprises a domain with at least 50%, 60%, 70%, 75%, 80%, 85%, 90%, 95%, 96%, 97%, 98%, 99% or 100% sequence identity to a stretch of at least 10, 15, 20, 25, 30, 35, 40, 45, or 50 amino acids or an intracellular domain from 4-1BB (CD137), B7-H3, B7-HCDR3, BAFFR, BTLA, C100 (SEMA4D), CD2, CD3D, CD3E, CD3G, CD4, CD7, CD8A, CD8B, CD11A, CD11B, CD11C, CD11D, CD18, CD19, CD27, CD28, CD28 deleted for Lck binding (ICΔ), CD29, CD30, CD40, CD49A, CD49D, CD49F, CD69, CD79A, CD79B, CD84, CD96 (Tactile), CD103, CD160 (BY55), CD162 (SELPLG), CD226 (DNAM1), CD229 (Ly9), a ligand that specifically binds with CD83, CDS, CEACAM1, CRLF2, CRTAM, CSF2RA, CSF2RB, CSF3R, EPOR, Fc receptor gamma chain, Fc receptor ε chain, FCER1G, FCGR2C, FCGRA2, GADS, GHR, GITR, HVEM, IA4, ICAM-1, ICOS, IFNAR1, IFNAR2, IFNGR1, IFNGR2, IFNLR1, IL1R1, IL1RAP, IL1RL1, IL1RL2, IL2RA, IL2RB, IL2RG, IL3RA, IL4R, IL5RA, IL6R, IL6ST, IL7RA, IL9R, IL10RA, IL10RB, IL11RA, IL12RB1, IL12RB2, IL13RA1, IL13RA2, IL15RA, IL17RA, IL17RB, IL17RC, IL17RD, IL17RE, IL18R1, IL18RAP, IL20RA, IL20RB, IL21R, IL22RA1, IL23R, IL27RA, IL31RA, ITGA4, ITGA6, ITGAD, ITGAE, ITGAL, ITGAM, ITGAX, ITGB1, ITGB2, ITGB7, LAT, LEPR, LFA-1 (CD11a/CD18), LIGHT, LIFR, LMP1, LTBR, MPL, MYD88, NKG2C, NKP80 (KLRF1), OSMR, OX40, PD-1, PRLR, PSGL1, PAG/Cbp, SLAM (SLAMF1, CD150, IPO-3), SLAMF4 (C244, 2B4), SLAMF6 (NTB-A, Ly108), SLAMF7, SLAMF8 (BLAME), SLP-76, TILR2, TILR4, TILR7, TILR9, TNFR2, TNFRSF4, TNFRSF8, TNFRSF9, TNFRSF14, TNFRSF18, TRANCE/RANKL, VLA1, or VLA-6,or functional mutants and/or fragments thereof, or functional mutants and/or fragments thereof. In any of the embodiments disclosed herein, the lymphoproliferative element can include an extracellular ligand binding domain or a small molecule binding domain. In some embodiments, the lymphoproliferative element can include a transmembrane domain. In some embodiments, the transmembrane domain can include a transmembrane domain from BAFFR, C3Z, CEACAM1, CD2, CD3A, CD3B, CD3D, CD3E, CD3G, CD3Z, CD4, CD5, CD7, CD8A, CD8B, CD9, CD11A, CD11B, CD11C, CD11D, CD27, CD16, CD18, CD19, CD22, CD28, CD29, CD33, CD37, CD40, CD45, CD49A, CD49D, CD49F, CD64, CD79A, CD79B, CD80, CD84, CD86, CD96 (Tactile), CD100 (SEMA4D), CD103, C134, CD137, CD154, CD160 (BY55), CD162 (SELPLG), CD226 (DNAM1), CD229 (Ly9), CD247, CRLF2, CRTAM, CSF2RA, CSF2RB, CSF3R, EPOR, FCER1G, FCGR2C, FCGRA2, GHR, HVEM (LIGHTR), IA4, ICOS, IFNAR1, IFNAR2, IFNGR1, IFNGR2, IFNLR1, IL1R1, IL1RAP, IL1RL1, IL1RL2, IL2RA, IL2RB, IL2RG, IL3RA, IL4R, IL5RA, IL6R, IL6ST, IL7RA, IL7RA Ins PPCL, IL9R, IL10RA, IL10RB, IL11RA, IL12RB1, IL12RB2, IL13RA1, IL13RA2, IL15RA, IL17RA, IL17RB, IL17RC, IL17RD, IL17RE, IL18R1, IL18RAP, IL20RA, IL20RB, IL21R, IL22RA1, IL23R, IL27RA, IL31RA, ITGA1, ITGA4, ITGA6, ITGAD, ITGAE, ITGAL, ITGAM, ITGAX, ITGB1, ITGB2, ITGB7, KIRDS2, LEPR, LFA-1 (CD11a, CD18), LIFR, LTBR, MPL, NKp80 (KLRF1), OSMR, PAG/Cbp, PRLR, PSGL1, SLAM (SLAMF1, CD150, IPO-3), SLAMF4 (CD244, 2B4), SLAMF6 (NTB-A, Ly108), SLAMF7, SLAMF8 (BLAME), TNFR2, TNFRSF4, TNFRSF8, TNFRSF9, TNFRSF14, TNFRSF18, VLA1, or VLA-6, or functional mutants and/or fragments thereof.

[0682] In some embodiments of any aspect herein that include RIPs, the RIPs can comprise a binding polypeptide and a fusogenic element, and can include a polynucleotide, which in illustrative embodiments is the genome of the RIP, that encodes any of the anti-idiotype polypeptides disclosed herein. In some embodiments, a polynucleotide in the RIP encodes an anti-idiotype polypeptide provided herein, which typically further encodes a CAR, a lymphoproliferative element, one or more inhibitory RNA molecules and/or a cytokine. In some embodiments, a polynucleotide in the RIP encodes an anti-idiotype polypeptide provided herein and a CAR, and optionally further encodes a lymphoproliferative element, one or more inhibitory RNA molecules and/or a cytokine. In some embodiments, one or more viral envelope proteins comprise the binding polypeptide and the fusogenic element. In some embodiments, a viral envelope protein is a mutated viral envelope protein wherein a binding polypeptide of the viral envelope protein has been mutated to reduce/eliminate binding to a target cell (e.g. a T cell), but wherein such binding is provided by another (e.g. a heterologous) binding polypeptide which in further illustrative embodiments is also an activation element as provided herein (e.g. a polypeptide that binds CD3). In some embodiments, the viral envelope protein comprises the feline endogenous virus (RD114) envelope protein, an oncoretroviral amphotropic envelope protein, an oncoretroviral ecotropic envelope protein, the vesicular stomatitis virus envelope protein (VSV-G), the baboon retroviral envelope glycoprotein (BaEV), the murine leukemia envelope protein (MuLV), the influenza glycoprotein HA surface glycoprotein (HA), the influenza glycoprotein neurominidase (NA), the paramyxovirus Measles envelope protein H, the paramyxovirus Measles envelope protein F, the Tupaia paramyxovirus (TPMV) envelope protein H, the TPMV envelope protein F, the Nipah virus (NiV) envelope protein F, the NiV envelope protein G, the Sindbis virus (SINV) protein E1, the SINV protein E2, and/or functional variants or fragments of any of these envelope proteins. In some embodiments, the viral envelope protein is the NiV envelope protein G, wherein the NiV envelope protein G comprises one or more mutations in residues Y389, E501, W504, E505, V507, Q530, E533, or I588 of SEQ ID NO:375. In some embodiments, Henipavirus-G protein is SEQ ID NO:375 with mutations E533A and/or Q530A. In some embodiments, one or more N- or O-glycosylation sites are mutated to improve pseudotyping and fusion. In some embodiments, one or more N-glycosylation sites are mutated for example, but not limited to, at one or more of N72, N159, N306, N378, N417, N481, or N529 of SEQ ID NO:375, or the corresponding glutamines of other Henipavirus-G proteins, to another amino acid such as glutamine. In some embodiments, one or more O-glycosylation sites are mutated from serine or threonine to another amino acid such as alanine. In some embodiments, one or more of the serine or threonine residues in the heavily O-glycosylated stalk domain from amino acids 103 to 137 of SEQ ID NO:375, is mutated to, for example, alanine. In other embodiments, the C-terminus of the Henipavirus-G protein can be modified and fused to a binding polypeptide and in illustrative embodiments, an activation element, such as an antibody or antibody mimetic, which in illustrative embodiments can be an anti-CD3 antibody or antibody mimetic.

[0683] In any of the aspects and embodiments provided herein that include a RIP, the RIP comprises a pseudotyping element on its surface that is capable of binding to a T cell and/or NK cell and facilitating membrane fusion of the RIP thereto. In some embodiments, the pseudotyping element is a viral envelope protein. In some embodiments, the viral envelope protein is one or more of the feline endogenous virus (RD114) envelope protein, the oncoretroviral amphotropic envelope protein, the oncoretroviral ecotropic envelope protein, the vesicular stomatitis virus envelope protein (VSV-G), the baboon retroviral envelope glycoprotein (BaEV), the murine leukemia envelope protein (MuLV), and/or the paramyxovirus Measles envelope proteins H and F, the Tupaia paramyxovirus (TPMV) envelope protein H, the TPMV envelope protein F, the Nipah virus (NiV) envelope protein F, the NiV envelope protein G, the Sindbis virus (SINV) protein E1, the SINV protein E2, or a fragment of any thereof that retains the ability to bind to resting T cells and/or resting NK cells. In illustrative embodiments, the pseudotyping element is VSV-G. As discussed elsewhere herein, the pseudotyping element can include a fusion with a T cell activation element, which in illustrative embodiments, can be a fusion with any of the envelope protein pseudotyping elements, for example MuLV or VSV-G, with an anti-CD3 antibody. In further illustrative embodiments, the pseudotyping elements include both a VSV-G and a fusion of an antiCD3scFv to MuLV.

[0684] In any of the aspects herein that include a RIP, the RIP(s) can comprise an activation element on their surface. In some embodiments, the activation element on the surface is a membrane-bound T cell activation element. In some embodiments, the activation element is a polypeptide capable of binding to a polypeptide on the surface of a lymphocyte, and in illustrative embodiments, a T cell and/or an NK cell. In some subembodiments of these and embodiments of any of the aspects provided herein,

[0685] In some embodiments, the T cell activation element comprises one or more of an antibody or an antibody mimetic capable of binding CD28, CD3, TCR α/β, CD28, or a mitogenic tetraspanin, or wherein said T cell activation element is a mitogenic tetraspanin. In some embodiments, the T cell activation element comprises the antibody or the antibody mimetic capable of binding CD3, and wherein the T cell activation element is bound to the membrane of the RIPs. In some embodiments, the membrane-bound anti-CD3 antibody or anti-CD3 antibody mimetic is an anti-CD3 scFv, an anti-CD3 scFvFc, or an anti-CD3 DARPin. In some embodiments, the anti-CD3 antibody or anti-CD3 antibody mimetic is bound to the membrane by a GPI anchor, such as a heterologous GPI anchor attachment sequence, wherein the anti-CD3 antibody or anti-CD3 antibody mimetic is a recombinant fusion protein with a MuLV viral envelope protein, with or without a mutation at a furin cleavage site, or wherein the anti-CD3 antibody or anti-CD3 antibody mimetic is a recombinant fusion protein with a VSV viral envelope protein, or wherein the anti-CD3 antibody or anti-CD3 antibody mimetic is a recombinant fusion protein with a Henipavirus-G envelope protein, or wherein the anti-CD3 antibody is a recombinant fusion protein with a NiV viral envelope protein. In some embodiments, the polypeptide capable of binding CD28 is CD80, or an extracellular domain thereof, bound to a CD16B GPI anchor attachment sequence.

[0686] In illustrative embodiments, the activation element is a T cell activation element capable of binding to a TCR complex polypeptide. In some embodiments, a TCR complex polypeptide is CD3D, CD3E, CD3G, CD3Z, TCRα, or TCRβ. In some embodiments, the activation element capable of binding to the TCR complex polypeptide is a polypeptide capable of binding to one or more of CD3D, CD3E, CD3G, CD3Z, TCRα, or TCRβ. In illustrative embodiments, the activation element activates ZAP-70. In some embodiments, the activation element includes a polypeptide capable of binding to CD16A, NKG2C, NKG2E, NKG2F, or NKG2H. In further embodiments, the polypeptide capable of binding to CD16A includes capable of binding to one or more of NKp46, 2B4, CD2, DNAM, NKG2C, NKG2D, NKG2E, NKG2F, or NKG2H. In some embodiments, the activation element is a polypeptide capable of binding to one or more of the following combinations: NKp46 and 2B4, NKp46 and CD2, NKp46 and DNAM, NKp46 and NKG2D, 2B4 and DNAM, or 2B4 and NKG2D. In some embodiments, the activation element can be two or more polypeptides capable of binding to polypeptides on the surface of a lymphocyte. In some embodiments, the activation element can be two or more polypeptides capable of binding to at least one of the following combinations: NKp46 and 2B4, NKp46 and CD2, NKp46 and DNAM, NKp46 and NKG2D, 2B4 and DNAM, or 2B4 and NKG2D.

[0687] In some embodiments, provided herein as separate aspects, or as components of, or as produced by, or used in, methods, uses, and compositions provided herein, are modified cells, in illustrative embodiments T cells, that have a dimmed surface polypeptide, or a population of any of the preceding modified cells that have a dimmed surface polypeptide. Such modified CD4+ cells or CD8+ cells or a population thereof can be CD3 dimmed, and can have the following characteristics (referred to herein as “Dimmed T Cell Characteristics”), and in illustrative embodiments have the following characteristics at the time of forming and/or administering the cell formulation:
[0688] i) at least 9%, 10% 15%, 20%, 30%, 40%, 50%, 60%, 70%, 80%, 90%, 95%, or 99%, or between 10% and 50%, 60%, 70%, 80%, 90%, 95%, or 99%, or between 50% and 60%, 70%, 80%, 90%, 95%, or 99%, or between 9%, 10% 15%, 20%, 30%, 40%, 50%, 60%, 70%, 80%, 90%, or 95% on the low end and 99% on the high end of the CD4+ cells in the cell formulation are surface CD3-;
[0689] ii) at least 18%, 20%, 30%, 40%, 50%, 60%, 70%, 80%, 90%, 95%, or 99%, or between 20% and 50%, 60%, 70%, 80%, 90%, 95%, or 99%, or between 50% and 60%, 70%, 80%, 90%, 95%, or 99%, or between 18%, 20%, 30%, 40%, 50%, 60%, 70%, 80%, 90%, or 95% on the low end and 99% on the high end of the CD8+ cells in the cell formulation are surface CD3-;
[0690] iii) within the population of cells that are either CD4+ or CD8+ in the cell formulation, at least 10.5%, 15%, 20%, 30%, 40%, 50%, 60%, 70%, 80%, 90%, 95%, or 99%, or between 10% and 50%, 60%, 70%, 80%, 90%, 95%, or 99%, or between 25% and 50%, 60%, 70%, 80%, 90%, 95%, or 99%, or between 50% and 60%, 70%, 80%, 90%, 95%, or 99%, or between 10.5%, 15%, 20%, 30%, 40%, 50%, 60%, 70%, 80%, 90%, or 95% on the low end and 99% on the high end, are surface CD3-;
[0691] iv) at least 1.5%, 2%, 3%, 4%, 5%, 6%, 7%, 8%, 9%, 10%, or 11%, or between 1.5% and 2%, 3%, 4%, 5%, 6%, 7%, 8%, 9%, 10%, or 11%, or between 5% and 6%, 7%, 8%, 9%, 10%, or 11%; or between 1.5%, 2%, 3%, 4%, 5%, 6%, 7%, 8%, 9% or 10% and 11% of the cells in the cell formulation, excluding RBCs, are surface CD3-CD4+;
[0692] v) at least 0.65%, 0.75%, 1 %, 1.5%, 2%, 2.5%, 3%, 3.5%, 4%, 4.5% or 5%; between 0.65% and 0.75%, 1%, 1.5%, 2%, 2.5%, 3%, 3.5%, 4%, 4.5% or 5%; between 1 % and 1.5%, 2%, 2.5%, 3%, 3.5%, 4%, 4.5% or 5%; or between 0.65%, 0.75%, 1%, 1.5%, 2%, 2.5%, 3%, 3.5%, 4%, or 4.5% on the low end and 5% on the high end of the cells in the cell formulation, excluding RBCs, are surface CD3-CD8+;
[0693] vi) less than 13%, 12%, 11%, 10%, 9%, 8%, 7%, 6%, 5%, 4%, 3%, 2%, 1%, 0.5%, or 0.1% of the cells in the cell formulation, excluding RBCs, are surface CD3+ and either CD4+ or CD8+ (the “Percent Total CD3+ cells”);
[0694] vii) within the population of cells that are either CD4+ or CD8+ in the cell formulation, less than 89%, 80%, 75%, 70%, 60%, 50%, 40%, 30%, 25%, 20%, 15%, 10%, 5%, or 1 %, or between 89% and 50%, 40%, 30%, 20%, 10%, 5%, or 1%, or between 75% and 50%, 40%, 30%, 20%, 10%, 5%, or 1%, or between 50% and 40%, 30%, 20%, 10%, 5%, or 1%, or between 1% and 5%, 10%, 20%, 30%, 40%, 50%, 60%, 70%, 75% or 89%, are surface CD3+;
[0695] viii) CD4+ and/or CD8+ cells in the cell formulation have lower surface expression of CD3 than the surface expression of CD3 on CD4+ and/or CD8+ cells in blood collected from a healthy subject or a population of healthy subjects, wherein the surface expression of CD3 in the cell formulation is lower by at least a 10%, 20%, 25%, 30%, 40%, 50%, 60%, 70%, 80%, 90%, 95% or 99%, or between 10% and 20%, 25%, 30%, 40%, 50%, 60%, 70%, 80%, 90%, 95% or 99%, or between 50% and 60%, 70%, 80%, 90%, 95% or 99%, or between 10%, 20%, 25%, 30%, 40%, 50%, 60%, 70%, 80%, 90% or 95% on the low end and 99% on the high end; and/or
[0696] ix) the Percent Total CD3+ cells is reduced by at least 19%, 20% 30%, 40%, 50%, 60%, 70%, 80%, 90%, or 95% after contacting polynucleotide vectors, and in illustrative embodiments RIPs, compared to the Percent Total CD3+ cells in the absence of contacting the polynucleotide vectors, and in illustrative embodiments, RIPs.

[0697] In some embodiments, provided herein as separate aspects, or as components of, or as produced by, or used in, methods, uses, and compositions provided herein, are modified cells, in illustrative embodiments modified NK cells, that have a dimmed surface polypeptide, or a population of modified cells that have a dimmed surface polypeptide. Such modified cells, for example modified NK cells, or a population thereof can have one or more of CD16A, NKp46, 2B4, CD2, DNAM, NKG2C, NKG2D, NKG2E, NKG2F, or NKG2H dimmed, and can have the following characteristics (referred to herein as “Dimmed NK Cell Characteristics”), and in illustrative embodiments have the following characteristics at the time of forming and/or administering a cell formulation:
[0698] i) at least 9%, 10% 15%, 20%, 30%, 40%, 50%, 60%, 70%, 80%, 90%, 95%, or 99%, or between 10% and 50%, 60%, 70%, 80%, 90%, 95%, or 99%, or between 50% and 60%, 70%, 80%, 90%, 95%, or 99%, or between 9%, 10% 15%, 20%, 30%, 40%, 50%, 60%, 70%, 80%, 90%, or 95% on the low end and 99% on the high end of the CD56+ cells in the cell formulation are surface CD16A-, NKp46-, 2B4-, CD2-, DNAM-, NKG2C-, NKG2D-, NKG2E-, NKG2F-, and/or NKG2H-;
[0699] ii) within the population of cells that are CD56+ in the cell formulation, at least 10.5%, 15%, 20%, 30%, 40%, 50%, 60%, 70%, 80%, 90%, 95%, or 99%, or between 10% and 50%, 60%, 70%, 80%, 90%, 95%, or 99%, or between 25% and 50%, 60%, 70%, 80%, 90%, 95%, or 99%, or between 50% and 60%, 70%, 80%, 90%, 95%, or 99%, or between 10.5%, 15%, 20%, 30%, 40%, 50%, 60%, 70%, 80%, 90%, or 95% on the low end and 99% on the high end, are surface CD16A-, NKp46-, 2B4-, CD2-, DNAM-, NKG2C-, NKG2D-, NKG2E-, NKG2F-, and/or NKG2H-;
[0700] iii) at least 1.5%, 2%, 3%, 4%, 5%, 6%, 7%, 8%, 9%, 10%, or 11%, or between 1.5% and 2%, 3%, 4%, 5%, 6%, 7%, 8%, 9%, 10%, or 11%, or between 5% and 6%, 7%, 8%, 9%, 10%, or 11%; or between 1.5%, 2%, 3%, 4%, 5%, 6%, 7%, 8%, 9% or 10% and 11% of the cells in the cell formulation, excluding RBCs, are CD56+ and surface CD16A-, NKp46-, 2B4-, CD2-, DNAM-, NKG2C-, NKG2D-, NKG2E-, NKG2F-, and/or NKG2H-;
[0701] iv) less than 13%, 12%, 11%, 10%, 9%, 8%, 7%, 6%, 5%, 4%, 3%, 2%, 1%, 0.5%, or 0.1% of the cells in the cell formulation, excluding RBCs, are surface CD16A+, NKp46+, 2B4+, CD2+, DNAM+, NKG2C+, NKG2D+, NKG2E+, NKG2F+, and/or NKG2H+ and CD56+ (the “Percent Total CD16A, NKp46, 2B4, CD2, DNAM, NKG2C, NKG2D, NKG2E, NKG2F, and/or NKG2H cells”);
[0702] v) within the population of cells that are CD56+ in the cell formulation, less than 89%, 80%, 75%, 70%, 60%, 50%, 40%, 30%, 25%, 20%, 15%, 10%, 5%, or 1 %, or between 89% and 50%, 40%, 30%, 20%, 10%, 5%, or 1%, or between 75% and 50%, 40%, 30%, 20%, 10%, 5%, or 1%, or between 50% and 40%, 30%, 20%, 10%, 5%, or 1 %, or between 1 % and 5%, 10%, 20%, 30%, 40%, 50%, 60%, 70%, 75% or 89%, are surface CD16A+, NKp46+, 2B4+, CD2+, DNAM+, NKG2C+, NKG2D+, NKG2E+, NKG2F+, and/or NKG2H+ and CD56+;
[0703] vi) CD56+ cells in the cell formulation have lower surface expression of CD16A, NKp46, 2B4, CD2, DNAM, NKG2C, NKG2D, NKG2E, NKG2F, and/or NKG2H than the surface expression of CD16A, NKp46, 2B4, CD2, DNAM, NKG2C, NKG2D, NKG2E, NKG2F, and/or NKG2H, respectively, on CD56+ cells in blood collected from a healthy subject or a population of healthy subjects, wherein the surface expression of CD16A, NKp46, 2B4, CD2, DNAM, NKG2C, NKG2D, NKG2E, NKG2F, and/or NKG2H in the cell formulation is lower by at least a 10%, 20%, 25%, 30%, 40%, 50%, 60%, 70%, 80%, 90%, 95% or 99%, or between 10% and 20%, 25%, 30%, 40%, 50%, 60%, 70%, 80%, 90%, 95% or 99%, or between 50% and 60%, 70%, 80%, 90%, 95% or 99%, or between 10%, 20%, 25%, 30%, 40%, 50%, 60%, 70%, 80%, 90% or 95% on the low end and 99% on the high end; and/or
[0704] vii) the Percent Total CD16A, NKp46, 2B4, CD2, DNAM, NKG2C, NKG2D, NKG2E, NKG2F, and/or NKG2H cells is reduced by at least 19%, 20% 30%, 40%, 50%, 60%, 70%, 80%, 90%, or 95% after contacting polynucleotide vectors, and in illustrative embodiments RIPS, compared to the Percent Total CD16A, NKp46, 2B4, CD2, DNAM, NKG2C, NKG2D, NKG2E, NKG2F, and/or NKG2H cells in the absence of contacting the polynucleotide vectors, and in illustrative embodiments, RIPs.

[0705] In any of the aspects herein, in illustrative embodiments that include the Dimmed T Cell Characteristics or the Dimmed NK Cell Characteristics, the modified cells can be recently activated within the prior 7, 6, 5, 4, 3, 2, or 1 days.

[0706] In some embodiments of any of the cell formulation aspects or embodiments herein, or any method or use aspect that includes a cell formulation, or any of the population embodiments, some of the modified CD4+, modified CD8+, modified CD56+, modified T cells and/or modified NK cells therein, are in cell aggregates. In some embodiments, at least 1%, 2%, 3%, 4%, 5%, 7.5%, 10%, 15%, 20%, or 25%, or between 1% and 10% 15%, 20%, 25%, 50%, and 75% of the white blood cells, modified CD4+ cells, modified CD8+ cells, modified CD56+ cells, modified T cells and/or modified NK cells in the cell formulation are in cell aggregates. In some embodiments, the cell aggregates are greater than 15, 25, 30, 35, 40, 50, or 60 µm in diameter, or between 25 and 50, 60, 75, 100, 125, 150, 200 or 250 µm in diameter. In some embodiments, modified cells are in aggregates comprising at least 4, 5, 6, 7, 8, 9, 10, 20, 30, 40, 50, 100, 250, 500, 1,000, 2,500, 5,000, or 10,000 white blood cells or 5 to 500, 5 to 250, 5 to 100, 10 to 500, 10 to 250, or 10 to 100 white blood cells. Furthermore, in some embodiments, including sub-embodiments of the immediately preceding embodiment, at least 1%, 2%, 3%, 4%, 5%, 7.5%, 10%, 15%, 20%, or 25%, or between 1% and 10% 15%, 20%, 25%, 50%, and 75% of white blood cells, the modified T and/or NK cells in the cell formulation are in aggregates comprising, or comprising at least 4, 5, 6, 8, or 5 to 500, 5 to 250, 5 to 100, 10 to 500, 10 to 250, or 10 to 100 white blood cells, modified T cells and/or NK cells. Further, in some embodiments, the cell formulation comprises aggregates of modified T cells and/or NK cells, in some embodiments along with unmodified T cells and/or NK cells and/or other white blood cells, capable of being retained by a coarse filter having a pore diameter of at least 15, 20, 25, 30, 40, 50, or 60 µm. In certain illustrative embodiments, at least 5% of the white blood cells, T cells, NK cells, modified T cells and/or modified NK cells are in cell aggregates. In certain sub-embodiments, the cell aggregates are greater than 40 µm in diameter and/or are capable of being retained by a course filter having a pore diameter of at least 40 µm. In some sub-embodiments, the cell aggregates comprise 5 to 500 white blood cells or modified T cells.

[0707] In some embodiments of any of the aspects or embodiments herein that include administering cells, populations, or cell formulations to a subject, a persisting population of genetically modified cells, and in illustrative embodiments genetically modified T cells and/or NK cells, or a population of progeny cells or genetically modified progeny cells derived from the modified cells, persists in the subject for at least 1, 2, 3, 4, 5, 6, 7, 14, 17, 21, or 28 days or 1, 2, or 1, 2, 3, 4, 5, 6, 7, 8, 9, 10, 11, or 12 months or 1, 2, 3, 4, or 5 years after administration. In some embodiments, at least 50%, 60%, 70%, 80%, 90% or 95% of the genetically modified cells, and in illustrative embodiments CAR-T cells, express a first polypeptide comprising the transgene, and in illustrative embodiments express the engineered T cell receptor, or the CAR. In some embodiments, at least 50%, 60%, 70%, 80%, 90% or 95% of the genetically modified cells expressing the first polypeptide comprising the transgene are circulating in the blood and/or at the site of a tumor, for example a solid tumor and the remainder of the genetically modified cells are subcutaneous. In some embodiments, the persisting population is subcutaneous, is circulating in the blood, and/or is at the site of a tumor, for example a solid tumor. In some embodiments, the subcutaneous region contains no artificial matrix components.

[0708] In some embodiments, the persisting population is detectable by histology. In some embodiments, the persisting population persists subcutaneously for at least or up to 14, 21, 28, 50, 60, 90 days and is detectable by histology. In some embodiments, the persisting population is detectable by FACS, for example FACs for the CAR or a removal tag (e.g. eTag), for example as 2 genetically modified cells/µl blood, or by qPCR, for example qPCR or sequencing of the transgene or across a chimeric junction of a CAR, or for a non-human subject treated with human engineered cells, such as human CAR-T cells, human RNAse P (hRNAseP). In some embodiments, the persisting population is detectable in the blood.

[0709] In some embodiments of any of the aspects provided herein, including but not limited to the method and use aspects provided hereinabove in this Exemplary Embodiments section, the modified cells, for example modified T cells and/or NK cells, or a population thereof, have a surface polypeptide dimmed, which in illustrative embodiments can be a TCR complex polypeptide, and in illustrative sub-embodiments, CD3. Such dimmed cells, including populations thereof, in illustrative embodiments exhibit any of the Dimmed T Cell Characteristics and/or Dimmed NK Cell Characteristics provided herein.

[0710] In some embodiments of any of the aspects provided herein, including but not limited to the method and use aspects provided hereinabove in this Exemplary Embodiments section, some (e.g. at least 5%, 7.5%, or 10%) of the modified cells, for example modified T cells and/or NK cells, or a population thereof, or a population thereof, are in aggregates, as disclosed herein.

[0711] In some embodiments of any of the aspects provided herein, including but not limited to the method and use aspects provided hereinabove in this Exemplary Embodiments section the cells form a population, which can be a persistent population, as disclosed herein.

[0712] In any of the persisting population or population of progeny cells aspects or embodiments herein, or any aspect or embodiment herein that includes a persisting population or a population of progeny cells, the number of modified cells, such as modified T cells and/or NK cells, and in illustrative embodiments genetically modified T cells and/or NK cells, comprises at least 100, 1 × 10³,1 × 10⁴, 1 × 10⁵, 1 × 10⁶, 1 × 10⁷,1 × 10⁸, 1 × 10⁹, 1 × 10¹⁰, 1 × 10¹¹, or 1 × 10¹² cells or between 1 × 10³ and 1 × 10⁴, 1 × 10⁵, 1 × 10°, 1 × 10⁷, 1 × 10⁸, or 1 × 10⁹ cells. In some embodiments, the modified cells, and in illustrative embodiments modified T cells and/or NK cells present in the cell formulation administered to a subject multiply at least 5, 10, 15, 20, 25, 50, 75, 100, 250, 500, 750, 1,000, 2,500, 5,000, or 10,000 fold in the subject, for example to form a persisting population or a population of progeny cells.

[0713] In some embodiments, the persisting population or the population of progeny cells express an engineered T cell receptor or a CAR, and the persisting population or the population of progeny cells is detected indirectly by a durable clinical response. For example, such persistence can be detected by detecting stable disease, a partial response, or a complete response with a duration of response of at least 3, 6, 9, 12, 18, or 24 months after initial observation of a clinical response, which in some embodiments is stable disease for patients experiencing progressive disease before administration of the cells, and in illustrative embodiments administration of the engineered T cell or CAR-T therapy.

[0714] In any of the aspects provided herein that include a step of collecting blood, the volume of blood collected can be for example, between 5 ml and 600 ml. More volumes and ranges are provided elsewhere in this specification, and in some embodiments, include the Small Volume Elements provided herein. In some embodiments when collected blood is processed using a filter, in illustrative embodiments a leukoreduction filter, the volume of blood sample applied to a filter is 600, 500, 400, 300, 200, 150, 120, 100, 75, 50, 40, 30, 25, 20, 15, 10, or 5 ml or less. In illustrative embodiments, the volume of blood sample applied to a filter is 50, 25, 20, 15, 10, 9, 8, 7, 6, 5, 4, 3, 2, or 1 ml or less.

[0715] In some embodiments of any of the aspects provided herein, the cell formulation, which in illustrative embodiments can be in a syringe, has a volume of between 0.5 ml and 20 ml, 15 ml, 10 ml, 5 ml, or 1 ml; or between 1 ml and 20 ml, 15 ml, 10 ml, 5 ml, 4 ml, 3 ml, 2 ml or less; or between 2 ml and 20 ml, 15 ml, 10 ml, 7 ml or 5 ml; or between 5 ml and 20 ml, 15 ml or 10 ml, or between 3 ml and 12 ml, or less than 3 ml. In some embodiments of any of the aspects or embodiments provided herein, wherein blood is collected from a subject, the blood collected has a volume of between 2.5 ml and 75 ml, 60 ml, 50 ml, 40 ml, 30 ml, 25 ml, 20 ml, 15 ml, 10 ml, or 5 ml, or between 5 ml and 75 ml, 60 ml, 50 ml, 40 ml, 30 ml, 25 ml, 20 ml, 15 ml, or 10 ml, or between 10 ml and 75 ml, 60 ml, 50 ml, 50 ml, 40 ml, 30 ml, 25 ml, or 20 ml, or between 15 ml and 75 ml, 60 ml, 50 ml, 50 ml, 40 ml, 30 ml, 25 ml, or 20 ml, or between 20 ml and 75 ml, 60 ml, 50 ml, 40 ml, 30 ml, or 25 ml, or between 25 ml and 75 ml, 70 ml, 60 ml, 50 ml, 40 ml, and 30 ml, or between 5 ml, 10 ml, or 15 ml on the low end and 20 ml on the high end. In some embodiments when collected blood is processed using a filter, in illustrative embodiments a leukoreduction filter, the volume of a whole blood sample, or a fraction thereof applied to a filter can be between 2.5 ml and 75, 50, 40, 30, 25, 20, 15, or 10. In illustrative embodiments, the volume of a whole blood sample, or a fraction thereof applied to a filter is between 10 ml and 50, 25, 20, 15 ml. In some embodiments, the volume of a whole blood sample, or fraction thereof applied to a filter is 10, 9, 8, 7, 6, 5, 4, 3, 2, or 1 ml or less. In some embodiments of any of the aspects or embodiments provided herein, the volume of the reaction mixture is between 2.5 ml and 75 ml, 60 ml, 50 ml, 40 ml, 30 ml, 25 ml, 20 ml, 15 ml, 10 ml, or 5 ml, or between 5 ml and 75 ml, 70 ml, 60 ml, 50 ml, 40 ml, 30 ml, 25 ml, 20 ml or 10ml, or between 10 ml and 75 ml, 70 ml, 60 ml, 50 ml, 40 ml, 30 ml, 25 ml, 20 ml, or 15 ml, or between 15 ml and 75 ml, 70 ml, 60 ml, 50 ml, 40 ml, 30 ml, 25 ml, or 20 ml, or between 20 ml and 75 ml, 70 ml, 60 ml, 50 ml, 40 ml, 30 ml, or 25 ml or between 25 ml and 75 ml, 70 ml, 60 ml, 50 ml, 40 ml, and 30 ml. The volumes for the cell formulation, the collected blood, and the reaction mixture in this paragraph are herein referred to as the “Small Volume Elements.” In illustrative subembodiments of embodiments that include the Small Volume Elements, the cell formulation is adapted for subcutaneous delivery, wherein the number of modified cells, such as modified T cells and/or NK cells in the modified cell formulation, is between 1.5 × 10⁴ and 1.5 × 10⁹, 1 × 10⁹, 1 × 10⁸, or 1 × 10⁷ or between 1 × 10⁵ and 1.5 × 10⁸, between 1 × 10⁵ and 1 × 10⁷, or between 1 × 10⁶ and 1 × 10⁸, or between 2 × 10⁶ and 1 × 10⁸, or in illustrative embodiments, between 3 × 10⁴ and 3 × 10⁷, between 1 × 10⁵ and 3 × 10⁷, or between 1 × 10⁶ and 3 × 10⁷ modified T cells, NK cells, CD4+ cells, CD8+ cells, and/or CD56+ cells.

[0716] In some embodiments, a contacting step is performed in a blood processing bag or other incubation bag, for example wherein whole blood, or a fraction thereof is added to an incubation bag comprising RIPs to form a reaction mixture or wherein the RIPs are added to the incubation bag comprising the whole blood to form the reaction mixture.

[0717] In illustrative embodiments of any of the encapsulated polynucleotide vectors (e.g. polynucleotide vector particles), and in illustrative embodiments retroviral particle, aspects provided herein, or any other aspect that includes a polynucleotide vector particle, the polynucleotide vector particle is substantially free of the protein transcript encoded by the nucleic acid of the polynucleotide vector particle, for example substantially free an engineered T cell receptor or CAR encoded by the nucleic acid of the polynucleotide vector polynucleotide vector particle.

[0718] In some embodiments, a sample such as a blood sample or a reaction mixture before, during, or after an incubation, is applied to a leukoreduction filter for example to remove RIPs not associated with lymphocytes. In some embodiments, at least 75%, 80%, 85%, 86%, 87%, 88%, 89%, 90%, 91%, 92%, 93%, 94%, 95%, 96%, 97%, 98%, 99 %, 99.5%, or 99.9% of the RIPs not associated with the lymphocytes are removed from a reaction mixture. In some embodiments, a reaction mixture is filtered over the leukoreduction filter at a flow rate of between 0.25 and 1, 1.5, 2, 2.5, 3, 3.5, 4, 4.5, or 5 ml/min, or between 0.5 and 2 ml/min. In some embodiments, the reaction mixture is filtered over the leukoreduction filter using a syringe. In some embodiments, the syringe is at less than an 80°, 75°, 70°, 65°, 60°, 55°, 50°. or 45° angle with respect to a channel (e.g. tubing) that is in fluid communication with the leukoreduction filter, when the reaction mixture is filtered. In some embodiments, blood cells and modified lymphocytes are not moved across a junction with a greater than 70°, 75°, or 80° angle during the removing the RIPs. In some embodiments, the leukoreduction filter has an effective filtration area of between 3 cm² and 5 cm² and in these or other embodiments, the diameter of the pore in the filter is between 2 and 6 µm. In some embodiments, cells retained by the leukoreduction filter after a reaction mixture is filtered over the leukoreduction filter, are washed with a volume of wash buffer that is 0.25 to 3 times the volume of the reaction mixture. In some embodiments, the removing of the RIPs is performed within a filter assembly comprising a syringe, the leukoreduction filter in fluid communication with the syringe, and one or more bags in fluid communication with the leukoreduction filter. In some embodiments, the removing of the RIPs is performed within a filter assembly comprising a second syringe and a second bag, wherein the second bag is in fluid communication with the leukoreduction filter.

[0719] In any aspect provided herein that includes a polynucleotide(s), such as an isolated polynucleotide(s) encoding an anti-idiotype polypeptide, and one or more of a CAR, a cytokine, one or more inhibitory RNA, and/or an LE, such polynucleotides or isolated polynucleotides can be contained in one or more containers, and for example in 0.1 ml to 10 ml of a solution. Such polynucleotides can contain substantially-pure, GMP grade, recombinant vectors (e.g., replication incompetent retroviral particles). In some embodiments, such polynucleotides comprise recombinant naked DNA vectors. In illustrative embodiments, such polynucleotides are a container of replication incompetent retroviral particles having between 1 × 10⁶ and 5 × 10⁹, 1 × 10⁷ and 1 × 10⁹, 5 × 10⁶ and 1 × 10⁸, 1 × 10⁶ and 5 × 10⁷, 1 × 10⁶ and 5 × 10⁶ or between 5 ×10⁷ and 1 ×10⁸ retroviral Transducing Units (TUs) or TUs/ml, or at least 100, 1,000, 2,000 or 2,500 TUs/ng p24.

[0720] In any of the aspects provided herein, the contacting step including with an optional incubation combined can be performed (or can occur) for 14, 12, or 10 hours or less, or in illustrative embodiments for 8, 6, 4, 3, 2, or 1 hour or less, or in certain further illustrative embodiments less than 8 hours, less than 6 hours, less than 4 hours, 2 hours, less than 1 hour, less than 30 minutes or less than 15 minutes, but in each case there is at least an initial contacting step in which retroviral particles and cells are brought into contact in suspension in a transduction reaction mixture. In other embodiments, the reaction mixture can be incubated for between 15 minutes and 12 hours, 15 minutes and 10 hours, 15 minutes and 8 hours, 15 minutes and 6 hours, 15 minutes and 4 hours, 15 minutes and 2 hours, 15 minutes and 1 hour, 15 minutes and 45 minutes, or 15 minutes and 30 minutes. In other embodiments, the reaction mixture can be incubated for between 30 minutes and 12 hours, 30 minutes and 10 hours, 30 minutes and 8 hours, 30 minutes and 6 hours, 30 minutes and 4 hours, 30 minutes and 2 hours, 30 minutes and 1 hour, or 30 minutes and 45 minutes. In other embodiments, the reaction mixture can be incubated for between 1 hour and 12 hours, 1 hour and 8 hours, 1 hour and 4 hours, or 1 hour and 2 hours. In another illustrative embodiment, the contacting is performed for between an initial contacting step only (without any further incubating in the reaction mixture including the retroviral particles free in suspension and cells in suspension) without any further incubation in the reaction mixture, or a 5 minute, 10 minute, 15 minute, 30 minute, or 1 hour incubation in the reaction mixture. In certain embodiments, the contacting can be performed (or can occur) for between 30 seconds or 1, 2, 5, 10, 15, 30 or 45 minutes, or 1, 2, 3, 4, 5, 6, 7, or 8 hours on the low end of the range, and between 10 minutes, 15 minutes, 30 minutes, or 1, 2, 4, 6, 8, 10, 12, 18, 24, 36, 48, and 72 hours on the high end of the range. In illustrative embodiments, the contacting can be performed (or can occur) for between a contacting only, 30 seconds or 1, 2, 5, 10, 15, 30 or 45 minutes, or 1 hour on the low end of the range, and between 2, 4, 6, and 8 hours on the high end of the range. In some embodiments, the RIPs can be immediately washed out after adding them to the cell(s) to be modified, genetically modified, and/or transduced such that the contacting time is carried out for the length of time it takes to wash out the RIPs. Accordingly, typically the contacting includes at least an in initial contacting step in which a retroviral particle(s) and a cell(s) are brought into contact in suspension in a transduction reaction mixture. Such methods can be performed without prior activation.

[0721] In illustrative embodiments of methods provided herein, the contacting step with optional incubating, is performed at temperatures between 32° C. and 42° C., such as at 37° C. as provided in more detail herein. In other illustrative embodiments, the contacting step with optional incubating, is performed at temperatures lower than 37° C., such as between 1° C. and 25° C., 2° C. and 20° C., 2° C. and 15° C., 2° C. and 6° C., or 3° C. and 6° C. The optional incubating associated with the contacting step at these temperatures can be performed for any length of time discussed herein. In illustrative embodiments, the optional incubating associated with these temperatures is performed for 1 hour or less, such as for 0 to 55 minutes (i.e., 55 minutes or less), 0 to 45 minutes (i.e., 45 minutes or less), 0 to 30 min (i.e., 30 minutes or less), 0 to 15 minutes (i.e., 15 minutes or less), 0 to 10 minutes (i.e., 10 minutes or less), 0 to 5 minutes (i.e., 5 minutes or less), 5 to 30 minutes, 5 to 15 minutes, or 10 to 30 minutes. In further illustrative embodiments, the cold contacting and incubating is performed at temperatures between 2° C. and 15° C. for between 0 to 55 minutes, 0 to 45 minutes, 0 to 30 min, 0 to 15 minutes, 0 to 10 minutes, 0 to 5 minutes, 5 to 15 minutes, or 10 to 30 minutes. In other further illustrative embodiments, the cold contacting and incubating is performed for 5 to 30 minutes at a temperature between 1° C. and 25° C., 2° C. and 20° C., 2° C. and 15° C., 2° C. and 6° C., or 3° C. and 6° C.

[0722] In certain embodiments that comprise a contacting step at the colder temperatures provided immediately above, a secondary incubation is typically performed by suspending cells after an optional wash step in a solution comprising recombinant vectors, in illustrative embodiments retroviral particles. In illustrative embodiments, the secondary incubation is performed at temperatures between 32° C. and 42° C., such as at 37° C. The optional secondary incubation can be performed for any length of time discussed herein. In illustrative embodiments, the optional secondary incubation is performed for 6 hours or less, such as for 1 to 6 hours, 1 to 5 hours, 1 to 4 hours, 1 to 3 hours, 1 to 2 hours, 2 to 4 hours, 30 minutes to 4 hours, 10 minutes to 4 hours, 5 minutes to 4 hours, 5 minutes to 1 hour, 1 minute to 5 minutes, or less than 5 minutes. Thus, in some illustrative embodiments, optionally the T cell and/or NK cell activation element is on the surface of the RIPs, the contacting is performed at between 2° C. and 15° C., and optionally between 2° C. and 6° C., for less than 1 hour, optionally after which the TNCs are incubated at between 32° C. and 42° C. for between 5 minutes and 8 hours, or in illustrative embodiments, between 5 minutes and 4 hours, and optionally after which the modified T cells and/or NK cells are collected on a filter to form the cell formulation

[0723] In some embodiments, no more than 16 hours, 14 hours, 12 hours, 8 hours, 4 hours, 2 hours, or 1 hour pass, or between 5, 10, 15, 30, 45, or 60 minutes on the low end of the range, and between 1.5, 2, 4, 6, 8, 10, 12, 14, and 16 hours on the high end of the range, for example between 5 minutes and 16 hours, 5 minutes and 12 hours, 5 minutes and 8 hours, 5 minutes and 6 hours, 5 minutes and 4 hours, 5 minutes and 3 hours, 5 minutes and 2 hours, or 5 minutes and 1 hour pass, between the time blood, TNCs, or PBMCs are contacted with recombinant nucleic acid vectors, which in illustrative embodiments are replication incompetent retroviral particles, and the time the modified cells are suspended and thus formulated in a delivery solution to form a cell formulation. In some embodiments, the time between when the cells are contacted with the replication incompetent retroviral particles and when the modified cells are formulated in a delivery solution can be between 1 and 16 hours, 1 and 14 hours, 1 and 12 hours, 1 and 8 hours, 1 and 6 hours, 1 and 4 hours, or 1 and 2 hours. In some embodiments, no more than 16 hours, 14 hours, 12 hours, 8 hours, 4 hours, 2 hours, or 1 hours pass between the time blood is collected from the subject and the time the modified lymphocytes are reintroduced into the subject. In some embodiments, the time between when the blood is collected from the subject and when the modified lymphocytes are reintroduced into the subject can be between 1 and 16 hours, 1 and 14 hours, 1 and 12 hours, 1 and 8 hours, 1 and 6 hours, 1 and 4 hours, or 1 and 2 hours.

[0724] In any of the aspects provided herein that include an administering step, in illustrative embodiments, administered cells are processed ex vivo, for example using any of the methods comprising contacting and formulating steps provided herein, for less than 24, 18, 12, 10, 8, 6, 4, 2, or 1 hour or 30 or 15 minutes, or for between 15 minutes and 24, 18, 12, 10, 8, 6, 4, 2, 1, or 0.5 hours, or for between 1 hour and 24, 18, 12, 10, 8, 6, 4, or 2 hours, before the administration. Thus, in certain embodiments such ex vivo times can be the time between collecting blood from a subject and intravenous, intramuscular, intratumor, intraperitoneal, and in illustrative embodiments subcutaneous administration of modified lymphocytes, in illustrative embodiments derived from lymphocytes from the subject, to the subject

[0725] In some embodiments of any relevant aspect herein, some or all of the T and NK cells do not yet express the recombinant nucleic acid or have not yet integrated the recombinant nucleic acid into the genome of the cell before being used or included in any of the methods or compositions provided herein, including, but not limited to, being introduced or reintroduced back into a subject, or before, or at the time of being used to prepare a cell formulation. In some embodiments, at least 25%, 30%, 40%, 45%, 50%, 55%, 60%, 65%, 70%, 75%, 80%, 85%, 90%, 95%, 96%, 97%, 98%, 99%, or all of the modified T and NK cells do not express a CAR or transposase, and/or do not have a CAR associated with their cell membrane, when the modified lymphocytes are introduced or reintroduced back into a subject, and in illustrative embodiments introduced or reintroduced back into a subject subcutaneously or intramuscularly, or when used to prepare a cell formulation. In other embodiments, provided herein are cell formulations wherein at least 25%, 30%, 40%, 45%, 50%, 55%, 60%, 65%, 70%, 75%, 80%, 85%, 90%, 95%, 96%, 97%, 98%, 99%, or all of the modified T and/or NK cells in a cell formulation contain recombinant viral reverse transcriptase and/or integrase. In illustrative embodiments, at least 25%, 50%, 60%, 70%, 75%, 80%, 85%, 90%, 95%, 96%, 97%, 98%, 99%, or all of the modified T and NK cells do not express a CAR, and/or do not have a CAR associated with their cell membrane when the modified lymphocytes are introduced or reintroduced back into a subject, and in illustrative embodiments introduced or reintroduced back into a subject subcutaneously or intramuscularly, or when used to prepare a cell formulation. In illustrative embodiments, at least 25%, 50%, 55%, 60%, 65%, 70%, 75%, 80%, 85%, 90%, 95%, 96%, 97%, 98%, 99%, or all of the modified T and NK cells do not express a recombinant mRNA (e.g., encoding a CAR) when the lymphocytes are introduced or reintroduced into a subject, and in illustrative embodiments introduced or reintroduced back into a subject subcutaneously or intramuscularly, or when used to prepare a cell formulation. In some embodiments, greater than 50%, 60%, 70%, 75%, 80% or 90% of the cells, NK cells, and/or T cells in a cell formulation are viable.

[0726] In some embodiments, at least 20%, 25%, 30%, 35%, 40%, 45%, 50%, 55%, 60%, 65%, 70%, 75%, 80%, 85%, 90%, 95%, 96%, 97%, 98%, 99%, or all of the modified T and NK cells do not have the recombinant nucleic acid stably integrated into their genomes when the lymphocytes are introduced or reintroduced into a subject, and in illustrative embodiments introduced or reintroduced back into a subject subcutaneously or intramuscularly, or when used to prepare a cell formulation. In illustrative embodiments, at least 25%, 30%, 40%, 45%, 50%, 55%, 60%, 65%, 70%, 75%, 80%, 85%, 90%, 95%, 96%, 97%, 98%, 99%, or all of the modified T and NK cells do not have the recombinant nucleic acid stably integrated into their genomes when the lymphocytes are introduced or reintroduced into a subject, and in illustrative embodiments introduced or reintroduced back into a subject subcutaneously or intramuscularly, or when used to prepare a cell formulation. In some embodiments of any of the aspects herein that include modified, genetically modified, transduced, and/or stably transfected lymphocytes, any percentage of the lymphocytes can be modified, genetically modified, transduced, and/or stably transfected when the lymphocytes are introduced or reintroduced back into a subject, and in illustrative embodiments introduced or reintroduced back into a subject subcutaneously or intramuscularly, or when a cell formulation is prepared. In some embodiments, at least 4%, 5%, 10%, 15%, 20%, 25%, 30%, 35%, 40%, 45%, 50%, 55%, 60%, 65%, 70%, 75%, 80%, 85%, 90%, or 95% of the lymphocytes are modified. In illustrative embodiments, between 4%, 5%, 10%, 15%, 20%, 25%, 30%, 35%, 40%, 45%, 50%, 55%, 60%, 65%, and 70% of the lymphocytes are modified on the low end of the range and 10%, 15%, 20%, 25%, 30%, 35%, 40%, 45%, 50%, 55%, 60%, 65%, 70%, 75%, 80%, 85%, 90%, and 95% of the lymphocytes are modified on the high end of the range. In some embodiments, at least 5%, 10%, 15%, 20%, 25%, 30%, 35%, 40%, 45%, 50%, 55%, 60%, 65%, 70%, 75%, 80%, 85%, 90%, 95%, 96%, 97%, 98%, 99%, or all of the modified lymphocytes are not genetically modified, transduced, or stably transfected. In illustrative embodiments, at least 25%, 30%, 35%, 40%, 45%, 50%, 55%, 60%, 65%, 70%, 75%, 80%, 85%, 90%, 95%, 96%, 97%, 98%, 99%, or all of the modified lymphocytes are not genetically modified, transduced, or stably transfected. In some embodiments, between 5%, 10%, 15%, 20%, 25%, 30%, 35%, 40%, 45%, 50%, 55%, 60%, 65%, and 70% of the modified lymphocytes are not genetically modified, transduced, or stably transfected on the low end of the range and 10%, 15%, 20%, 25%, 30%, 35%, 40%, 45%, 50%, 55%, 60%, 65%, 70%, 75%, 80%, 85%, 90%, 95%, 96%, 97%, 98%, and 99% or all of the modified lymphocytes are not genetically modified, transduced, or stably transfected on the high end of the range (e.g., between 10% and 95%). Genetically modified lymphocytes containing a recombinant nucleic acid can either have the recombinant nucleic acid extrachromosomal or integrated into the genome. In some embodiments, at least 5%, 10%, 15%, 20%, 25%, 30%, 35%, 40%, 45%, 50%, 55%, 60%, 65%, 70%, 75%, 80%, 85%, 90%, 95%, 96%, 97%, 98%, 99%, or all of the genetically modified lymphocytes have an extrachromosomal recombinant nucleic acid. In illustrative embodiments, at least 25%, 30%, 35%, 40%, 45%, 50%, 55%, 60%, 65%, 70%, 75%, 80%, 85%, 90%, 95%, 96%, 97%, 98%, 99%, or all of the genetically modified lymphocytes have an extrachromosomal recombinant nucleic acid. In some embodiments, between 5%, 10%, 15%, 20%, 25%, 30%, 35%, 40%, 45%, 50%, 55%, 60%, 65%, and 70% of the modified or genetically modified lymphocytes have an extrachromosomal recombinant nucleic acid on the low end of the range and 10%, 15%, 20%, 25%, 30%, 35%, 40%, 45%, 50%, 55%, 60%, 65%, 70%, 75%, 80%, 85%, 90%, 95%, 96%, 97%, 98%, and 99% or all of the modified or genetically modified lymphocytes have an extrachromosomal recombinant nucleic acid on the high end of the range (e.g. between 10% and 95%). In some embodiments, at least 5%, 10%, 15%, 20%, 25%, 30%, 35%, 40%, 45%, 50%, 55%, 60%, 65%, 70%, 75%, 80%, 85%, 90%, 95%, 96%, 97%, 98%, 99%, or all of the modified or genetically modified lymphocytes are not transduced or stably transfected. In illustrative embodiments, at least 25%, 30%, 35%, 40%, 45%, 50%, 55%, 60%, 65%, 70%, 75%, 80%, 85%, 90%, 95%, 96%, 97%, 98%, 99%, or all of the modified or genetically modified lymphocytes are not transduced or stably transfected. In some embodiments, between 5%, 10%, 15%, 20%, 25%, 30%, 35%, 40%, 45%, 50%, 55%, 60%, 65%, and 70% of the modified or genetically modified lymphocytes are transduced or stably transfected on the low end of the range and 10%, 15%, 20%, 25%, 30%, 35%, 40%, 45%, 50%, 55%, 60%, 65%, 70%, 75%, 80%, 85%, 90%, 95%, 96%, 97%, 98%, and 99% or all of the modified or genetically modified lymphocytes are not transduced or stably transfected on the high end of the range.

[0727] In some embodiments of any aspect herein wherein a formulation is administered to a subject, a second formulation is administered to the subject at a second, third, fourth, etc. timepoint between 1 day and 1 month, 2 months, 3 months, 6 months, or 12 months after the administering a first cell formulation, wherein the second formulation can be identical to the first formulation, or can comprises any of the formulations provided herein. i) a cytokine, ii) an antibody, antibody mimetic, or polypeptide that is capable of binding CD3, CD28, OX40, 4-1BB, ICOS, CD9, CD53, CD63, CD81, and/or CD82, and/or iii) a source of the cognate antigen recognized by the CAR, and optionally wherein the cytokine is IL-2, IL-7, IL-15, or IL-21, or a modified version of any of these cytokines that is capable of binding to and activating a native receptor for the cytokine.

[0728] In some embodiments of any of the aspects herein that include a cell mixture or cell formulation, any cell in a cell mixture can be enriched. For example, a cell useful in adoptive cell therapy, such as one or more cell populations of T and/or NK cells, can be enriched prior to formulation for delivery. In some embodiments, the one or more cell populations can be enriched after the cell mixture is contacted with a recombinant nucleic acid vector, such as a replication incompetent retroviral particle. In some embodiments, enriching the one or more cell populations can be performed at the same time as any of the methods of genetic modification disclosed herein, and in illustrative embodiments genetic modification with a replication incompetent retroviral particle.

[0729] In some embodiments of any of the aspects herein that include a cell mixture or cell formulation, one or more unwanted cell populations can be depleted, such that the desired cells in the cell mixture or cell formulation are enriched. In some embodiments, the one or more cell populations can be depleted by negative selection prior to being contacted with a recombinant nucleic acid vector, such as a replication incompetent retroviral particle. In some embodiments, the one or more cell populations can be depleted by negative selection after the cell mixture is contacted with a recombinant nucleic acid vector, such as a replication incompetent retroviral particle. In some embodiments, depleting the one or more cell populations can be performed before or at the same time as any of the methods of genetic modification disclosed herein, and in illustrative embodiments genetic modification with a replication incompetent retroviral particle.

[0730] In some embodiments, the unwanted cells include cancer cells. Cancer cells from many types of cancer can enter the blood and could be unintentionally genetically modified at a low frequency along with the lymphocytes using the methods provided herein. In some embodiments, the cancer cell can be derived from any cancer, including, but not limited to: renal cell carcinoma, gastric cancer, sarcoma, breast cancer, lymphoma, B cell lymphoma, a B cell lymphoma such as diffuse large B cell lymphoma (DLBCL), Hodgkin’s lymphoma, non-Hodgkin’s B-cell lymphoma (B-NHL), neuroblastoma, glioma, glioblastoma, medulloblastoma, colorectal cancer, ovarian cancer, prostate cancer, mesothelioma, lung cancer (e.g., small cell lung cancer), melanoma, leukemia, chronic lymphocytic leukemia (CLL), acute lymphocytic leukemia (ALL), acute myelogenous leukemia (AML), or chronic myelogenous leukemia (CML), or any of the cancers listed in this disclosure. In illustrative embodiments, the CAR-cancer cell can be derived from a lymphoma, and, in illustrative embodiments, a B-cell lymphoma.

[0731] In certain embodiments of any of the aspects herein that include blood cells, the blood cells in the reaction mixture comprise at least 10% neutrophils and at least 0.5% eosinophils, as a percent of the white blood cells in the reaction mixture.

[0732] In certain embodiments of any of the aspects herein that include a reaction mixture and/or a cell formulation, the reaction mixture and/or the cell formulation comprises at least 5%, 10%, 20%, 25%, 30%, or 40% neutrophils as a percent of cells in the reaction mixture or cell formulation, or between 20% and 80%, 25% and 75%, or 40% and 60% neutrophils as a percent of white blood cells in the reaction mixture or cell formulation.

[0733] In certain embodiments of any of the aspects herein that include a reaction mixture and/or a cell formulation, the reaction mixture and/or the cell formulation comprises at least 0.1% eosinophils, or between 0.25% and 8% eosinophils, or between 0.5% and 4% as a percent of white blood cells in the reaction mixture or cell formulation.

[0734] In certain embodiments of any of the aspects herein that include blood cells, the blood cells in the reaction mixture are not subjected to a PBMC enrichment procedure before the contacting.

[0735] In certain embodiments of any of the aspects herein that include a reaction mixture, the reaction mixture is formed by adding the recombinant retroviral particles to whole blood.

[0736] In certain embodiments of any of the aspects herein that include a reaction mixture, the reaction mixture is formed by adding the recombinant retroviral particles to substantially whole blood comprising an effective amount of an anticoagulant.

[0737] In certain embodiments of any of the aspects herein that include a reaction mixture, the reaction mixture comprises an anticoagulant. For example, in certain embodiments, the anticoagulant is selected from the group consisting of acid citrate dextrose, EDTA, or heparin. In certain embodiments, the anticoagulant is other than acid citrate dextrose. In certain embodiments, the anticoagulant comprises an effective amount of heparin.

[0738] In certain embodiments of any of the aspects herein that include a reaction mixture, the reaction mixture is in a blood bag during the contacting.

[0739] In certain embodiments of any of the aspects herein that are or include a method, the method further comprises administering the modified T cells and/or NK cells to a subject subcutaneously. Optionally in such certain embodiments, the modified T cells and/or NK cells are delivered in a cell formulation that further comprises neutrophils. Furthermore, optionally in such certain embodiments, the neutrophils are present in the cell formulation at a concentration too high for safe intravenous delivery, and/or the cell formulation comprises 5%, 10%, 15%, 20%, or 25% neutrophils. In some embodiments of any of the methods herein that include a collecting, contacting, and an administrating step, the modified lymphocytes are introduced back into the subject within 14 hours, 12 hours, 8 hours, 6 hours, 4 hours, 2 hours, 1 hour, or 30 minutes from the time the blood comprising the lymphocytes is collected from the subject. In illustrative embodiments, such methods include subcutaneous administration. In illustrative embodiments, such methods include collecting blood cells using apheresis, or filtration of blood cells or modified lymphocytes over a filter, such as a leukoreduction filter.

[0740] In certain embodiments of any of the aspects herein that includes a method, the method further comprises administering the modified T cells and/or NK cells to the subject subcutaneously in the presence of a hyaluronidase. In further illustrative subembodiments, the T cells and/or NK cells that were modified, were obtained from the subject.

[0741] In further subembodiments of these embodiments including administering the modified and in illustrative embodiments genetically modified T cells and/or NK cells to the subject subcutaneously in the presence of a hyaluronidase, the modified T cells and/or NK cells are delivered subcutaneously to a subject in a volume between 1 ml and 5 ml. In further subembodiments, the T cells and/or NK cells are in blood drawn from a subject, and the modified T cells and/or NK cells are delivered back into the subject, and in further embodiments within 1-14, 1-8 hours, 1-6 hours, 1-4 hours, 1-2 hours, or within 1 hour from the time the blood is drawn from the subject.

[0742] In certain embodiments of any of the aspects herein that include a reaction mixture, the reaction mixture is in contact with a leukoreduction filter assembly in a closed cell processing system before the contacting, at the time the recombinant retroviral particles and the blood cells are contacted, during the contacting comprising an optional incubating in the reaction mixture, and/or after the contacting comprising the optional incubating in the reaction mixture.

[0743] In some embodiments of any of the aspects herein, at least 10%, 20%, 25%, 30%, 40%, 50%, most, 60%, 70%, 75%, 80%, 90%, 95%, or 99% of the T cells are resting T cells, or of the NK cells are resting NK cells, when they are combined with the replication incompetent retroviral particles to form the reaction mixture.

[0744] In any of the aspects herein that include modifying cells, the cell or cells are not subjected to a spinoculation procedure, for example not subjected to a spinoculation of at least 800 g for at least 30 minutes.

[0745] In some embodiments of any of the aspects herein that include a method, the method further comprises administering the modified T cells and/or NK cells to a subject, optionally wherein the subject is the source of the blood cells. In some subembodiments of these and embodiments of any of the methods and uses herein, including those in this Exemplary Embodiments section, provided that it is not incompatible with, or already stated, the modified, genetically modified, and/or transduced lymphocyte (e.g. T cell and/or NK cell) or population thereof, undergoes 4 or fewer cell divisions ex vivo prior to being introduced or reintroduced into the subject. In some embodiments, no more than 8 hours, 6 hours, 4 hours, 2 hours, or 1 hour pass(es) between the time blood is collected from the subject and the time the modified lymphocytes are reintroduced into the subject. In some embodiments, all steps after the blood is collected and before the blood is reintroduced, are performed in a closed system, optionally in which a person monitors the closed system throughout the processing. In some embodiments, at least 10%, 15%, 20%, 25%, 30%, 35%, 40%, 45%, 50%, 55%, 60%, 65%, 70%, 75%, 80%, 85%, or 90% of the modified lymphocytes in the solution can include a pseudotyping element or a T cell activating antibody on their surfaces. In some embodiments, the pseudotyping element and/or a T cell activating antibody can be bound to the surface of the modified lymphocytes through, for example, a T cell receptor, and/or the pseudotyping element and/or a T cell activating antibody can be present in the plasma membrane of the modified lymphocytes.

[0746] In any of the kits provided hereinabove, the first and/or second polynucleotides can comprise any self-driving CAR provided herein. Additional kit aspects and embodiments are provided hereinbelow, and in the Detailed Description herein, outside this Exemplary Embodiments section.

[0747] For any of the aspects provided herein that include a syringe, in illustrative embodiments, the syringe is compatible with, effective for, and/or adapted for intramuscular, and in illustrative embodiments subcutaneous delivery, and/or is effective to inject intramuscularly, effective to inject subcutaneously, adapted to inject intramuscularly, and/or adapted to inject subcutaneously. For example, the syringe can have a needle with a gauge between 20 and 22 and a length between 1 inch and 1.5 inches for intramuscular delivery and a needle with a gauge between 26 and 30 and a length between 0.5 inches and 0.625 inches for subcutaneous delivery.

[0748] In certain embodiments of any of the aspects and other embodiments herein that comprise a polynucleotide that encodes a CAR and an LE (e.g., polynucleotides, RIPs, cell formulations, populations, genetically modified lymphocytes, reaction mixtures, mammalian packaging cell lines comprising a packageable RNA genome for a replication incompetent retroviral particle, kits, uses of a RIP(s) in the manufacture of a kit for genetically modifying and/or transducing a lymphocyte, methods for genetically modifying and/or transducing a T cell or an NK cell, methods for administering a genetically modified lymphocyte to a subject), the polynucleotide can include or encode an ant-idiotype polypeptide and one or more of a CAR, and LE, a cytokine, and one or more inhibitory RNA molecules.

[0749] In some embodiments, the self-driving CAR embodiment can be a polynucleotide comprising a first transcriptional unit operably linked to an inducible promoter inducible in at least one of a T cell or an NK cell, and a second transcriptional unit operably linked to a constitutive T cell or NK cell promoter, wherein the first transcriptional unit and the second transcriptional units are arranged divergently, wherein the first transcriptional unit encodes an LE, and wherein the second transcriptional unit encodes an anti-idiotype polypeptide and a CAR, wherein the CAR comprises an ASTR, a transmembrane domain, and an intracellular activating domain.

[0750] In any of the aspects herein that include recombinant retroviral particles in a container and/or reaction mixture, the recombinant retroviral particles are present in the container and/or reaction mixture at an MOI of between 0.1 and 50, 0.5 and 50, 0.5 and 20, 0.5 and 10, 1 and 25, 1 and 15, 1 and 10, 1 and 5, 2 and 15, 2 and 10, 2 and 7, 2 and 3, 3 and 10, 3 and 15, or 5 and 15 or at least 0.1, 0.5, 1, 2, 2.5, 3, 5, 10 or 15 or are present in the reaction mixture at an MOI of at least 0.1, 0.5, 1, 2, 2.5, 3, 5, 10 or 15. For kit and isolated retroviral particle embodiments, such MOI can based on 1, 2.5, 5, 10, 20, 25, 50, 100, 250, 500, or 1,000 ml assuming 1×10⁶ target cells/ml, for example in the case of whole blood, assuming 1×10⁶ PBMCs/ml of blood.

[0751] In any of the aspects herein that include a contacting cells with retroviral particles, sufficient retroviral particles are present in a reaction to achieve an MOI of between 0.1 and 50, 0.5 and 50, 0.5 and 20, 0.5 and 10, 1 and 25, 1 and 15, 1 and 10, 1 and 5, 2 and 15, 2 and 10, 2 and 7, 2 and 3, 3 and 10, 3 and 15, or 5 and 15 or at least 0.1, 0.5, 1, 2, 2.5, 3, 5, 10 or 15, or to achieve an MOI of at least 0.1, 0.5, 1, 2, 2.5, 3, 5, 10 or 15.

[0752] In any of the aspects herein that include a genetically modified T cell and/or NK cell, at least 5%, at least 10%, at least 15%, or at least 20% of the T cells and/or NK cells are genetically modified, or between 5% and 85%, or between 5% and 20%, 25%, 50%, 60%, 70%, 80%, or 85%, or between 5%, 10%, 15%, 20%, or 25% on the low end of the range, and 20%, 25%, 50%, 60%, 70%, 80%, or 85% on the high end of the range.

[0753] In any of the aspects herein that include, RIPs, the RIPs are lentiviral particles. In further illustrative embodiments, the modified cell is a modified T cell or a modified NKT cell.

[0754] In any of the aspects herein that include a polynucleotide including one or more transcriptional units, the one or more transcriptional units can encode an anti-idiotype polypeptide and a polypeptide comprising a CAR. In some embodiments, the CAR is a microenvironment restricted biologic (MRB)-CAR. In other embodiments, the ASTR of the CAR binds to a tumor associated antigen. In other embodiments, the ASTR of the CAR is a microenvironment-restricted biologic (MRB)-ASTR.

[0755] In certain embodiments, any of the aspects and embodiments provided herein that include a polynucleotide that comprises a nucleic acid sequences operatively linked to a promoter active in T cells and/or NK cells, the polynucleotide encodes at least one polypeptide lymphoproliferative element comprising an anti-idiotype extracellular recognition domain. In illustrative embodiments, the anti-idiotype extracellular recognition domain is capable of binding the idiotype of an antibody that does not induce cytotoxicity. In illustrative embodiments, the polypeptide lymphoproliferative element is any of the polypeptide lymphoproliferative elements disclosed herein. In some embodiments, any or all of the nucleic acid sequences provided herein can be operably linked to a riboswitch. In some embodiments, the riboswitch is capable of binding a nucleoside analog. In some embodiments, the nucleoside analog is an antiviral drug.

[0756] In certain illustrative embodiments of any of the aspects herein that include blood cells in a reaction mixture, the blood cells in the reaction mixture are blood cells that were produced by a PBMC enrichment procedure and comprise PBMCs, or the blood cells in illustrative embodiments are PBMCs. In illustrative embodiments, such embodiments including PMBC enrichment are not combined with an embodiment where the reaction mixture includes at least 10% whole blood. Thus, in certain illustrative embodiments herein, the blood cells in a reaction mixture are the PBMC cell fraction from a PBMC enrichment procedure to which retroviral particles are added to form the reaction mixture, and in other illustrative embodiments, the blood cells in a reaction mixture are from whole blood to which retroviral particles are added to form the reaction mixture.

[0757] In any of the aspects and embodiments provided herein that include, or optionally include, a nucleic acid sequence encoding an inhibitory RNA molecule, the inhibitory RNA molecule targets any of the gene (e.g. mRNAs encoding) targets identified for example in the Inhibitory RNA Molecules section herein.

[0758] In illustrative embodiments of any of the kits, delivery solutions and/or cell formulations provided herein, especially those that effective for, or adapted for intramuscular and in illustrative embodiments subcutaneous delivery, the delivery solution and/or cell formulation is a depot formulation, or the cell formulation is an emulsion of cells that promotes cell aggregation. In some embodiments, a depot delivery solution comprises an effective amount of alginate, hydrogel, PLGA, a cross-linked and/or polymer hyaluronan, PEG, collagen, and/or dextran to form a depot formulation. In some embodiments the delivery solution and/or cell formulation is designed for controlled or delayed release. In some embodiments, the delivery solution and/or cell formulation includes components that form an artificial extracellular matrix such as a hydrogel.

[0759] In any of the aspects and embodiments provided herein that include, or optionally include, a cell mixture, delivery solution, or cell formulation, the cell mixture, delivery solution, or cell formulation can have a pH and ionic composition that provides an environment in which cells can survive, for example for at least 1 hour, and typically can survive for at least 4 hours. In some embodiments, the pH can be between pH 6.5 to pH 8.0, pH 7.0 to pH 8.0, or pH 7.2 to pH 7.6. In some embodiments, for example, when the RIP has a polynucleotide that encodes an MRB-CAR, the pH can be between pH 6.0 to pH 7.0, for example, pH 6.2 to pH 7.0, or pH 6.4 to pH 7.0, or pH 6.4 to pH 6.8. In some embodiments, the cell mixture, delivery solution, or cell formulation can be maintained by a buffer such as a phosphate buffer or bicarbonate present at a concentration effective for maintaining pH in a target range. In some embodiments, a cell mixture, delivery solution, or cell formulation can include a saline composition with salts, for example 0.8 to 1.0 or about 0.9 or 0.9 percent salts such as sodium chloride. In some embodiments, the delivery solution is or includes PBS. In some embodiments of a delivery solution and resulting cell formulation herein, the concentration of Na⁺ is between 110 mM and 204 mM, the concentration of Cl- is between 98 mM and 122 mM, and/or the concentration of K⁺ is between 3 mM and 6 mM.

[0760] In some embodiments of any of the aspects herein that include a modified or genetically modified T cell or NK cell, or methods, compositions, and kits for genetically modifying T cells and/or NK cells, the proliferation and survival of genetically modified T cells and/or NK cells expressing a CAR can be induced by cross-linking CAR molecule within a genetically modified T cell or NK cell, in the absence of the CAR molecules binding to their cognate antigens. Thus, in some embodiments, a T cell or NK cell can comprise an epitope tag bound by an antibody and cross-linked to an epitope tag of a second CAR on the same T cell or NK cell. In some embodiments, the extracellular domain of the CAR can include the epitope tag. In illustrative embodiments, the epitope tag can be in the stalk domain. In some embodiments, the epitope tag can be His5 (HHHHH; SEQ ID NO:76), HisX6 (HHHHHH; SEQ ID NO:77), c-myc (EQKLISEEDL; SEQ ID NO:75), Flag (DYKDDDDK; SEQ ID NO:74), Strep Tag (WSHPQFEK; SEQ ID NO:78), HA Tag (YPYDVPDYA; SEQ ID NO:73), RYIRS (SEQ ID NO:79), Phe-His-His-Thr (SEQ ID NO:80), or WEAAAREACCRECCARA (SEQ ID NO:81). In illustrative embodiments, the epitope tag can be the HisX6 tag (SEQ ID NO:77). In some embodiments, the CARs can be cross-linked and activated by adding soluble antibodies or antibody mimetics that bind the epitope tag, or in illustrative embodiments by adding cells, also referred to herein as universal feeder cells, expressing antibodies or antibody mimetics on their surfaces that bind the epitope tag,. In some embodiments, the same universal feeder cells, for example universal feeder cells expressing an anti-HisX6 antibody, can be used with cells that express CARs that bind to different antigens but that include the same epitope tag, for example HisX6. In some embodiments, the CARs can be cross-linked and activated by adding mRNA that encodes for one or more antibodies or antibody mimetics that bind the epitope tag. The mRNA may encode for antibodies or antibody mimetics that are soluble, membrane-bound, or both soluble and membrane-bound in some embodiments.

[0761] Provided herein in one aspect is a cell formulation (i.e., delivery composition), comprising a delivery solution formulated with tumor infiltrating lymphocytes (TILs) and/or modified or unmodified lymphocytes, in illustrative embodiments T cells and/or NK cells, wherein the cell formulation is compatible with, effective for, and/or adapted for subcutaneous or intramuscular delivery. In some embodiments for any of the cell formulations provided herein, the cell formulation is localized subcutaneously, or most of the cell formulation is localized subcutaneously, in a subject. In some embodiments, the cell formulation is localized subcutaneously or intramuscularly, or most of the cell formulation is localized subcutaneously or intramuscularly, in a subject. In some embodiments, wherein the cell formulation comprises TILs, the cell formulation can further comprise modified lymphocytes modified by either or both, being associated with a recombinant nucleic acid vectors, in illustrative embodiments a RIP, comprising a polynucleotide comprising one or more transcriptional units operatively linked to a promoter active in T cells and/or NK cells, or by being genetically modified with the polynucleotide, wherein the one or more transcriptional units encode a first polypeptide comprising a first CAR. In some embodiments, wherein the cell formulation comprises TILs, the cell formulation further comprises a source of a tumor antigen recognized by the TILs. In some embodiments, the TILs are contacted with a nucleic acid vector.

[0762] In addition to any of the method aspects and embodiments provided herein, further provided herein are use aspects and embodiments, comprising use of a kit for performing the method, or use of nucleic acid vectors, in illustrative embodiments RIPs, in the manufacture of a kit for performing the method, wherein the use of the kit is to perform the steps of the method aspects or embodiments.. Similarly, for any use aspects and embodiments provided herein, further provided herein are method aspects and embodiments, comprising the method as recited in the use aspects or embodiments.

[0763] The following non-limiting examples are provided purely by way of illustration of exemplary embodiments, and in no way limit the scope and spirit of the present disclosure. Furthermore, it is to be understood that any inventions disclosed or claimed herein encompass all variations, combinations, and permutations of any one or more features described herein. Any one or more features may be explicitly excluded from the claims even if the specific exclusion is not set forth explicitly herein. It should also be understood that disclosure of a reagent for use in a method is intended to be synonymous with (and provide support for) that method involving the use of that reagent, according either to the specific methods disclosed herein, or other methods known in the art unless one of ordinary skill in the art would understand otherwise. In addition, where the specification and/or claims disclose a method, any one or more of the reagents disclosed herein may be used in the method, unless one of ordinary skill in the art would understand otherwise.

### EXAMPLES

### Example 1 Preparation of a Phage Display Library of scFvs From Human CD19+ PBMCs

### Isolation of Human Immunoglobulin Heavy and Kappa Light Antibody Chains

[0764] Frozen human PBMCs previously isolated from the whole blood of 13 anonymous donors with informed consent (San Diego Blood Bank) were thawed and pooled (1.5 × 10⁸ PBMCs). CD19⁺ PBMCs were isolated (1.2 × 10⁷) using the EasySep™ Human CD19 Positive Selection Kit II (Stemcell Technologies, #17854). RNA (7 µg) was isolated from the CD19⁺ PBMCs using the RNeasy Plus Mini Prep Kit (Qiagen). First strand cDNA was synthesized from the mRNA transcripts using anchored oligo d(T)20 with SuperScript IV (Invitrogen). Antibody variable chains were then amplified by PCR using a degenerate primer pool specific for the human heavy chain and kappa light chain. The degenerate primer pool included 6 forward and 3 reverse primer sequences directed to the heavy chain, and 6 forward and 5 reverse primer sequences directed to the kappa light chain. 2 primers with distinct adapters to allow for directional cloning were used for each sequence.

### Assembly of the Xphage2 scFv Library

[0765] Each of the heavy chain PCR products and each of the kappa chain PCR products were gel purified and cloned into 2 orientation-specific cloning vectors. Heavy and kappa light chains were then seamlessly assembled with linkers into full scFvs within a phagemid backbone to generate the Xphage.2 library. Six unique sequences were used to link the heavy and light antibody chains to generate the library: GGSSRSS (“L1”, SEQ ID NO:673); (G₄S)₂ (“L2”, SEQ ID NO:674); (G₄S)₃ (“L3”, SEQ ID NO:673); (G₄S)₄ (“L4”, SEQ ID NO:372); (G₄S)₅ (“L5”, SEQ ID NO:675); and (G₄S)₆ (“L6”, SEQ ID NO:64).

### Estimation of Library Diversity

[0766] The diversity of the individual heavy chain and kappa light chain libraries was determined by a combination of NGS and bioinformatics. Briefly, the heavy and light chain libraries were sequenced using paired-end sequencing (Illumina). Paired-end reads were pre-processed by quality filtering with Trimmomatic v0.36, followed by read clipping and pairing. Clustering was then performed using custom scripts. The distribution of reads was used to reconstruct the diversity of the starting population by Recon (Kaplinsky & Arnaout 2016). The estimated total diversities of the heavy and light chain libraries are 3.7 × 10⁶ and 1.5 × 10⁶, respectively as shown in Table 6. The estimated total diversity of the Xphage2 scFv library was 6.7 ×10¹³ ((Kappa, 1.5×10⁶) × (Heavy, 3.7×10⁶) × (linkers, 6) × (orientations, 2)).

TABLE 6

Estimated diversity of the heavy and light (kappa) chain libraries

| | Heavy | Light (Kappa) |
|---|---|---|
| Initial number of reads | 29,940,489 | 23,173,768 |
| Number of sequences after preprocessing | 20,972,780 (70%) | 19,670,684 (85%) |
| Number of observed clusters | 2,074,152 | 525,995 |
| Estimated number of non-observed clusters | 1,649,947 | 1,001,427 |
| Estimated total diversity | 3,724,099 | 1,527,422 |

### Example 2 Isolation of Recombinant Anti-Idiotype Antibodies From the Xphage2 scFv Library

[0767] Monoclonal antibodies were used as bait (Ab1) to pan the Xphage2 scFv library and identify antibodies (Ab2) specific for the idiotype of the bait (Ab1). Two separate panning experiments were performed using different baits, Ab1.1in Panning Experiment 1 (PE1), and Ab1.2 in Panning Experiment 2 (PE2). Both baits were anti-EGFR (cetuximab). One bait was manufactured in CHO Chinese hamster cells (Selleck Chemicals, A2000) while the other was manufactured in SP2/0 mouse myeloma cells (Merck, 226667). Each of the antibodies used as baits was of the IgG1 isotype.

[0768] Liquid phase biopanning of the Xphage2 scFv library was performed using Ab1 antibodies coupled to magnetic Dynabeads. In Panning Experiment 1, five rounds of panning were performed using Dynabeads™ Protein A (Thermo Fisher, #10001D) and Dynabeads™ M-270 Epoxy (Thermo Fisher, #14301) in parallel. Briefly, in the first round panning polyclonal human IgG antibodies coupled to the Protein A or M-270 Epoxy Dynabeads that had been blocked with PBS + 2% milk and washed by PBS were 1:1 volume mixed with phage particles and incubated in PBS + 2% milk for 1 hour at room temperature before the supernatant was collected in a new tube. This pre-clear step was performed to remove non-specific phage that bound to the beads and human IgG monoclonal antibody (CrownBio, Cat. C0001). Dynabeads coupled to Ab1.1 and blocked with PBS + 2% milk were then added to the pre-cleared phage and incubated for 1.5 hours at room temperature before being washed 10 times with PBST (PBS containing 0.05% Tween-20) and 2 times with PBS. Phage bound to the Ab1.1 coupled beads were eluted twice in a total of 1.2 ml 0.1 M glycine-HCL, pH2.2 (“Elution Buffer”) and 0.6 ml 1 M Tris-HCL, pH8.0 (“Neutralization Buffer). The eluted phage was then used to infect TG1 bacteria (Lucigen, 60502-2) grown to an OD600 of 0.5 in 40 ml 2×YT medium. After a 1 hour incubation at 37° C., 1 ml of bacteria was removed for analysis (10 µl was used for phage titer determination and 50 ul was used for picking single colony by serial dilutions and the remainder was frozen for stock). The remaining TG1 were pelleted, resuspended in 1.5 ml 2xYT+Amp and spread on a 2YT+AMP+1%w/v glucose plate and incubated overnight at 37° C. The bacteria were then collected and used to inoculate 80 ml 2YT+AMP+1%w/v glucose and incubated at 37° C. until the OD600 was 0.5. Hyperphage M13 K07ΔpIII (Progen, PRHYPE) were added at an MOI of 20 and the mixture was incubated for 1 hour at 37° C. The bacteria were then collected, resuspended in 80 ml of 2YT+Amp+Kan medium with 0.1 mM IPTG, and cultured overnight at 30° C., 230 rpm. The supernatant was then collected, and phage particles were precipitated in a PEG8000/NaCl solution and resuspended in 1.8 ml PBS (the “phage output”) and tittered.

[0769] Subsequent rounds of panning were performed similarly using the phage output of the prior panning round, but with some modifications. In the fourth and fifth rounds of panning, a second pre-clear step was performed using anti-humanCD20 IgG antibodies (rituximab) (Selleck Chemicals, A2009) coupled to Dynabeads after the phage supernatant was pre-cleared with the human IgG polyclonal antibody (Thermofisher, Cat.02-7102). In the fourth panning round, PBS + 2% HSA was used in place of PBS + 2% milk to block the beads. For panning round 5b, 1 ml PBS containing 20 ug/ml EGFR-His was used to specifically compete and elute phage that displayed an Ab2 that recognizes the antigen (EGFR) binding site of Ab1.1.

[0770] FIG. 6A and FIG. 6B show, for each round of panning in PE1, the phage input (pfu), bead volume, number of washes, phage output (pfu), recovery rate and enrichment from the prior round for panning with Dynabeads™ Protein A and Dynabeads™ M-270 Epoxy, respectively. The pool ELISA result showed that panning with Dynabeads M-270 Epoxy showed better enrichment than Dynabeads Protein A after 3 rounds panning.

[0771] The phage output from each panning round was analyzed for Ab1.1 binding by ELISA. The wells of 96-well plates were coated with Ab1.1, and a serial dilution of the phage output from each panning round was added. Bound phage were detected using HRP conjugated anti-M13 antibody (Hangzhous Hua’an Biotech, #EM1902-18) and 1-Step™ Ultra TMB-ELISA Substrate Solution (Thermo Fisher Scientific, #34028). The absorbance at 450 nm was measured and data was processed using GraphPad Prism 8. The results of panning with Ab1.1 coupled to Dynabeads™ M-270 Epoxy is shown in FIG. 7. As shown in the graph, phage displaying antibodies that bind Ab1.1 were successfully isolated in each panning round. Furthermore, there was a large enrichment of Ab1.1-specific phage between rounds 1 and 2, and between rounds 2 and 3. Little enrichment of Ab1.1-specific phage was seen in subsequent rounds. Phage displaying antibodies that bind Ab1.1 were also isolated in each round of panning with Ab1.1 coupled to Dynabeads ™ Protein A.

[0772] Panning Experiment 2 (PE2) was performed using substantially similar methods to those used in PE1. Ab1.2 coupled to Dynabeads ™ M-270 Epoxy was used as bait for a total of 3 rounds of panning. PBS + 2% milk was used for all blocking steps. Prior to the first round of panning, the phage library was pre-cleared sequentially with human IgG polyclonal antibodies, anti-humanCD20 IgG antibodies (rituximab) (Selleck Chemicals, A2009), and anti-human Biotin-CD3 (OKT3) (Biolegend, #317320. In subsequent rounds, pre-clearing was performed using human IgG polyclonal antibodies without any subsequent pre-clearing steps. 0.1 M glycine-HCL, pH2.2 was used to elute Ab1.2-bound phage in each round. Similar to the results for PE1, phage displaying antibodies that bind Ab1.2 were successfully isolated in each panning round.

### Example 3. Identification of Individual Recombinant Anti-Idiotype Antibodies Specific For the Antibody Variable Domain to Which the Anti-Idiotype Was Raised

[0773] Individual anti-idiotype scFvs were cloned from phage pools and tested by ELISA for specific biding to the idiotype of the antibody that was used as bait for panning. Sequences of the scFvs were determined by Sanger sequencing.

[0774] 281 clones from Panning Experiment 1 (PE1) (89 clones from the 4^{th} panning round, and 192 clones from the 5^{th} panning round) and 95 clones from Panning Experiment 2 (PE2) (30 clones from the 2^{nd} panning round, and 65 clones from the 3^{rd} panning round) were expanded in TG1 and packaged with Hyperphage in 96 deep well plate. Monoclonal phage ELISAs were performed in which microtiter plates were coated with Ab1.1 (for PE1) or Ab1.2 (for PE2) or Control antibody, and individual phage clones were added to each well. Binding was detected with anti-M13-HRP and absorbance measured at OD450nm.

[0775] The results of the monoclonal phage ELISAs are shown in Tables 2, 3, 4, and 5. The columns indicate whether binding was to the bait (Ab1.1 or Ab1.2) or the Control antibody (rituximab). Binding is shown as the OD450nm. “Ratio” is the ratio of binding of bait to Control antibody. Because the baits and Control antibody are each chimeric monoclonal antibodies of the human IgG1 isotype, effective binding of phage to a bait but not the Control (determined as a Ratio > 3.0) indicate that the phage expresses an anti-idiotype antibody specific for the idiotype of the bait (Ab1.1 or Ab1.2). 24 clones from the 4^{th} panning round and 40 clones from the 5^{th} panning round of PE1 were identified as Ab1.1 anti-idiotype antibodies. Similarly, 23 clones from the 2^{nd} panning round and 54 clones from the 3^{rd} panning round of PE2 were identified as Ab1.2 anti-idiotype antibodies.

[0776] Sequence data for each unique scFv identified in PE1 is shown in FIG. 8 and the sequence data for each unique scFv identified in PE2 is shown in FIGS. 9A, 9B, and 9C. Individual clones are shown in each row. Shown in columns are the SEQ ID NOs. of the DNA and amino acid of the full scFvs, the orientation of the heavy and light chains, and the SEQ ID NO. of the linkers. Panning of the Xphage2 scFv library using Ab1.1 as bait in PE1 yielded 19 unique scFv clones. Similarly, panning of the Xphage2 scFv library using Ab1.2 as bait in PE2 yielded 42 unique scFv clones. The amino acid sequences of each CDR and their SEQ ID NO. are also shown. As shown in the tables, some clones shared a HCDR1, HCDR2, HCDR3, LCDR1, LCDR2, and/or LCDR3. Furthermore, some clones shared the same sequences for all of their CDRs. CDRs were determined using VBASE2 at www.vbase2.org.

[0777] The isolation of many unique scFv clones in PE1 and PE2 demonstrate that Xphage2 library and panning methods described herein can be used effectively to identify scFvs as well as antibody heavy and light chains that are capable of binding to the idiotypes of other antibodies.

### Example 4. Identification of Individual Recombinant Anti-Idiotype Antibodies That Recognize Specific Regions of the Idiotype of the Antibodies to Which the Anti-Idiotype Antibodies Were Raised

[0778] The anti-idiotype antibodies identified in Example 3 were further screened by competitive ELISA to identify both anti-idiotype antibodies specific to the antigen binding site (ABS) of their cognate Ab1 antibodies, and other anti-idiotype antibodies specific to epitopes of the idiotype that are outside of the ABS.

[0779] Cetuximab anti-EGFR antibody was used as bait (Ab1.2) in Panning Experiment 2. To identify anti-idiotype antibodies that bind the ABS of cetuximab and other antibodies that bind outside of the ABS, soluble EGFR (Acrobiosystems, Cat# EGR-H5222) was added to compete with monoclonal phage for binding to cetuximab in ELISAs. Briefly, microtiter plates were coated with Ab1.2 and 50 individual phage clones displaying anti-idiotype antibodies identified in PE2 were added to wells in duplicate. For each sample plated in duplicate, soluble EGFR at a final concentration of 1 µg/ml was added to one of the wells. Binding of monoclonal phage was detected with anti-M13-HRP and absorbance measured at OD450nm.

[0780] Results of the competitive ELISA for 50 monoclonal phage are shown in FIG. 10. Inhibition of binding (Inhibition%) was calculated as (OD in the absence of EGFR — OD in the presence of EGFR) / (OD in the absence of EGFR — OD of plate background) × 100. Soluble EGFR will compete with antibodies that recognize the ABS for binding to cetuximab. Therefore, Inhibition% will be high if the anti-idiotype antibody recognizes the ABS and low if the anti-idiotype antibody recognizes a region of cetuximab outside of the ABS. Monoclonal phage with an Inhibition% greater than the 75^{th} percentile of Inhibition% (92%) are selected to be anti-idiotype antibodies that recognize the ABS. Of the 50 phage shown in this screen, 13 clones were determined to be anti-idiotype antibodies that recognize the ABS of cetuximab. In contrast, monoclonal phage with an Inhibition% less than the 25^{th} percentile of Inhibition% (67%) are believed to be anti-idiotype antibodies that recognize regions of the variable domain that are outside of the ABS. Of the 50 phage shown in this screen, 6 clones were determined to be anti-idiotype antibodies that recognize regions of the variable domain of cetuximab that are outside of the ABS. The results in this example demonstrate that both anti-idiotype antibodies that recognize the ABS of a target antibody, and anti-idiotype antibodies that recognize an epitope of the idiotype of a target antibody that is outside of the ABS, can be identified using the methods described herein. Similar methods can also be used to identify antibody mimetics that bind the ABS of a target antibody or antibody mimetic.

### Example 5 Surface Expression of Anti-Idiotype Polypeptide on Mammalian Cells

[0781] Select anti-idiotype antibodies identified in Example 3 were cloned into vectors such that the transcriptional unit encoded a first polypeptide comprising a CAR and a second polypeptide comprising the anti-idiotype polypeptide. These vectors were transiently transfected and expressed on mammalian cells.

[0782] As shown in FIG. 11, the vector into which the scFvs were cloned encoded a CD19 CAR comprised of an anti-CD19scFv, a CD8 stalk and transmembrane region, and an intracellular domain from CD3z followed by T2A and an anti-idiotype scFv fused to a “STMICD” comprised of a Histidine tag (optional), a stalk, a transmembrane domain (TM), and an intracellular domain (optional) (“ICD”). A number of different STMICDs were tested. STMICD1 comprised the hinge, TM and 8 amino acids of the ICD PDGFRβ (SEQ ID NO: 676). STMICD2 comprised the hinge, TM and 9 amino acids of the ICD CD28 (SEQ ID NO: 677). STMICD3 comprised the hinge, TM and full ICD of CD28 (SEQ ID NO: 678). STMICD4 comprised the hinge, TM, and full ICD of CD28 fused to the full ICD of CD80 (SEQ ID NO: 679).

[0783] The expression vectors were transiently transfected into mammalian cells using Lipofectamine 2000 (Thermo Fisher Scientific), cultured at 37° C. and 5% CO₂ for 48 hours, harvested, and stained for FACs analysis with anti-His (BioLegend, 362607) and cetuximab (Selleck Chemicals, A2000), which was the Ab1 used as bait to identify the anti-idiotype scFvs.

[0784] Expression of anti-idiotype polypeptides on the surface of mammalian cells as detected by cetuximab is shown in FIG. 12. Vectors for Clone A and Clone B encoded unique scFvs, while the Control vector lacked an insert encoding an anti-idiotype polypeptide. Both Clone A and Clone B comprised STMICD4 in this experiment. As shown in FIG. 12, the anti-idiotype polypeptide was expressed as detected by Ab1 on 48.4% (Clone A) and 54.5% (Clone B) of transiently transfected 293T cells. Similarly, anti-idiotype polypeptide was expressed and detected on 8.3% (Clone A) and 10.6% (Clone B) of transiently transfected CHO-S cells. In a separate experiment, surface expression of the anti-idiotype polypeptide was also detected on cells when STMICD4 was replaced with each of STMICD1, STMICD2, and STMICD3 demonstrating that a variety of stalks, TMS, and ICDs could be used to achieve surface expression.

[0785] This example demonstrates that the methods and compositions disclosed herein can be used to generate anti-idiotype polypeptides that can be expressed on the surface of mammalian cells and are capable of binding to the variable domains of their target antibodies.

[0786] The disclosed embodiments, examples and experiments are not intended to limit the scope of the disclosure or to represent that the experiments below are all or the only experiments performed. Efforts have been made to ensure accuracy with respect to numbers used (e.g., amounts, temperature, etc.) but some experimental errors and deviations should be accounted for. It should be understood that variations in the methods as described may be made without changing the fundamental aspects that the experiments are meant to illustrate.

[0787] Those skilled in the art can devise many modifications and other embodiments within the scope and spirit of the present disclosure. Indeed, variations in the materials, methods, drawings, experiments, examples, and embodiments described may be made by skilled artisans without changing the fundamental aspects of the present disclosure. Any of the disclosed embodiments can be used in combination with any other disclosed embodiment.

[0788] In some instances, some concepts have been described with reference to specific embodiments. However, one of ordinary skill in the art appreciates that various modifications and changes can be made without departing from the scope of the invention as set forth in the claims below. Accordingly, the specification and figures are to be regarded in an illustrative rather than a restrictive sense, and all such modifications are intended to be included within the scope of invention.

TABLE 1

Parts, names, and amino acid sequences for domains of lymphoproliferative parts P1-P2, P1, P2, P3, and P4

| | | |
|---|---|---|
| Part | Name | Amino Acid Sequence |
| M001 | eTAG IL7RA Ins PPCL (interleukin 7 receptor) | MLLLVTSLLLCELPHPAFLLIPRKVCNGIGIGEFKDSLSINATNIKHFKNCTSISGDLHILPVAFRGDSFTHTPPLDPQELDILKTVKEITGFLLIQAWPENRTDLHAFENLEIIRGRTKQHGQFSLAVVSLNITSLGLRSLKEISDGDVIISGNKNLCYANTINWKKLFGTSGQKTKIISNRGENSCKATGQVCHALCSPEGCWGPEPRDCVSCRNVSRGRECVDKCNLLEGEPREFVENSECIQCHPECLPQAMNITCTGRGPDNCIQCAHYIDGPHCVKTCPAGVMGENNTLVWKYADAGHVCHLCHPNCTYGCTGPGLEGCPTNGPEINNSSGEMDPILLPPCLTISILSFFSVALLVILACVL (SEQ ID NO:84) |
| M002 | eTAG IL7RA Ins PPCL (interleukin 7 receptor) | MLLLVTSLLLCELPHPAFLLIPRKVCNGIGIGEFKDSLSINATNIKHFKNCTSISGDLHILPVAFRGDSFTHTPPLDPQELDILKTVKEITGFLLIQAWPENRTDLHAFENLEIIRGRTKQHGQFSLAVVSLNITSLGLRSLKEISDGDVIISGNKNLCYANTINWKKLFGTSGQKTKIISNRGENSCKATGQPEINNSSGEMDPILLPPCLTISILSFFSVALLVILACVL (SEQ ID NO:85) |
| M007 | Myc Tag LMP1 NC_007605_1 | MEQKLISEEDLEHDLERGPPGPRRPPRGPPLSSSLGLALLLLLLALLFWLYIVMSDWTGGALLVLYSFALMLIIIILIIFIFRRDLLCPLGALCILLLMITLLLIALWNLHGQALFLGIVLFIFGCLLVLGIWIYLLEMLWRLGATIWQLLAFFLAFFLDLILLIIALYLQQNWWTLLVDLLWLLLFLAILIWM (SEQ ID NO:86) |
| M008 | Myc LMP1 NC_007605_1 | MEQKLISEEDLSSSLGLALLLLLLALLFWLYIVMSDWTGGALLVLYSFALMLIIIILIIFIFRRDLLCPLGALCILLLMITLLLIALWNLHGQALFLGIVLFIFGCLLVLGIWIYLLEMLWRLGATIWQLLAFFLAFFLDLILLIIALYLQQNWWTLLVDLLWLLLFLAILIWM (SEQ ID NO:87) |
| M009 | LMP1 NC_007605_1 | MEHDLERGPPGPRRPPRGPPLSSSLGLALLLLLLALLFWLYIVMSDWTGGALLVLYSFALMLIIIILIIFIFRRDLLCPLGALCILLLMITLLLIALWNLHGQALFLGIVLFIFGCLLVLGIWIYLLEMLWRLGATIWQLLAFFLAFFLDLILLIIALYLQQNWWTLLVDLLWLLLFLAILIWM (SEQ ID NO:88) |
| M010 | LMP1 NC_007605_1 | MSLGLALLLLLLALLFWLYIVMSDWTGGALLVLYSFALMLIIIILIIFIFRRDLLCPLGALCILLLMITLLLIALWNLHGQALFLGIVLFIFGCLLVLGIWIYLLEMLWRLGATIWQLLAFFLAFFLDLILLIIALYLQQNWWTLLVDLLWLLLFLAILIWM (SEQ ID NO:89) |
| M012 | eTAG CRLF2 transcript variant 1 NM_022148_3 | MLLLVTSLLLCELPHPAFLLIPRKVCNGIGIGEFKDSLSINATNIKHFKNCTSISGDLHILPVAFRGDSFTHTPPLDPQELDILKTVKEITGFLLIQAWPENRTDLHAFENLEIIRGRTKQHGQFSLAVVSLNITSLGLRSLKEISDGDVIISGNKNLCYANTINWKKLFGTSGQKTKIISNRGENSCKATGQVCHALCSPEGCWGPEPRDCVSCRNVSRGRECVDKCNLLEGEPREFVENSECIQCHPECLPQAMNITCTGRGPDNCIQCAHYIDGPHCVKTCPAGVMGENNTLVWKYADAGHVCHLCHPNCTYGCTGPGLEGCPTNGAETPTPPKPKLSKCILISSLAILLMVSLLLLSLW (SEQ ID NO:90) |
| M013 | eTAG CRLF2 transcript variant 1 NM_022148_3 | MLLLVTSLLLCELPHPAFLLIPRKVCNGIGIGEFKDSLSINATNIKHFKNCTSISGDLHILPVAFRGDSFTHTPPLDPQELDILKTVKEITGFLLIQAWPENRTDLHAFENLEIIRGRTKQHGQFSLAVVSLNITSLGLRSLKEISDGDVIISGNKNLCYANTINWKKLFGTSGQKTKIISNRGENSCKATGQAETPTPPKPKLSKCILISSLAILLMVSLLLLSLW (SEQ ID NO:91) |
| M018 | eTAG CSF2RB NM_000395_2 | MLLLVTSLLLCELPHPAFLLIPRKVCNGIGIGEFKDSLSINATNIKHFKNCTSISGDLHILPVAFRGDSFTHTPPLDPQELDILKTVKEITGFLLIQAWPENRTDLHAFENLEIIRGRTKQHGQFSLAVVSLNITSLGLRSLKEISDGDVIISGNKNLCYANTINWKKLFGTSGQKTKIISNRGENSCKATGQVCHALCSPEGCWGPEPRDCVSCRNVSRGRECVDKCNLLEGEPREFVENSECIQCHPECLPQAMNITCTGRGPDNCIQCAHYIDGPHCVKTCPAGVMGENNTLVWKYADAGHVCHLCHPNCTYGCTGPGLEGCPTNGTESVLPMWVLALIEIFLTIAVLLAL (SEQ ID NO:92) |
| M019 | eTAG CSF2RB NM_000395_2 | MLLLVTSLLLCELPHPAFLLIPRKVCNGIGIGEFKDSLSINATNIKHFKNCTSISGDLHILPVAFRGDSFTHTPPLDPQELDILKTVKEITGFLLIQAWPENRTDLHAFENLEIIRGRTKQHGQFSLAVVSLNITSLGLRSLKEISDGDVIISGNKNLCYANTINWKKLFGTSGQKTKIISNRGENSCKATGQTESVLPMWVLALIEIFLTIAVLLAL (SEQ ID NO:93) |
| M024 | eTAG CSF3R transcript variant 1 NM_000760_3 | MLLLVTSLLLCELPHPAFLLIPRKVCNGIGIGEFKDSLSINATNIKHFKNCTSISGDLHILPVAFRGDSFTHTPPLDPQELDILKTVKEITGFLLIQAWPENRTDLHAFENLEIIRGRTKQHGQFSLAVVSLNITSLGLRSLKEISDGDVIISGNKNLCYANTINWKKLFGTSGQKTKIISNRGENSCKATGQVCHALCSPEGCWGPEPRDCVSCRNVSRGRECVDKCNLLEGEPREFVENSECIQCHPECLPQAMNITCTGRGPDNCIQCAHYIDGPHCVKTCPAGVMGENNTLVWKYADAGHVCHLCHPNCTYGCTGPGLEGCPTNGTPEGSELHIILGLFGLLLLLNCLCGTAWLCC (SEQ ID NO:94) |
| M025 | eTAG CSF3R transcript variant 1 NM_000760_3 | MLLLVTSLLLCELPHPAFLLIPRKVCNGIGIGEFKDSLSINATNIKHFKNCTSISGDLHILPVAFRGDSFTHTPPLDPQELDILKTVKEITGFLLIQAWPENRTDLHAFENLEIIRGRTKQHGQFSLAVVSLNITSLGLRSLKEISDGDVIISGNKNLCYANTINWKKLFGTSGQKTKIISNRGENSCKATGQTPEGSELHIILGLFGLLLLLNCLCGTAWLCC (SEQ ID NO:95) |
| M030 | eTAG EPOR transcript variant 1 NM_000121_3 | MLLLVTSLLLCELPHPAFLLIPRKVCNGIGIGEFKDSLSINATNIKHFKNCTSISGDLHILPVAFRGDSFTHTPPLDPQELDILKTVKEITGFLLIQAWPENRTDLHAFENLEIIRGRTKQHGQFSLAVVSLNITSLGLRSLKEISDGDVIISGNKNLCYANTINWKKLFGTSGQKTKIISNRGENSCKATGQVCHALCSPEGCWGPEPRDCVSCRNVSRGRECVDKCNLLEGEPREFVENSECIQCHPECLPQAMNITCTGRGPDNCIQCAHYIDGPHCVKTCPAGVMGENNTLVWKYADAGHVCHLCHPNCTYGCTGPGLEGCPTNGTPSDLDPCCLTLSLILVVILVLLTVLALLS (SEQ ID NO:96) |
| M031 | eTAG EPOR transcript variant 1 NM_000121_3 | MLLLVTSLLLCELPHPAFLLIPRKVCNGIGIGEFKDSLSINATNIKHFKNCTSISGDLHILPVAFRGDSFTHTPPLDPQELDILKTVKEITGFLLIQAWPENRTDLHAFENLEIIRGRTKQHGQFSLAVVSLNITSLGLRSLKEISDGDVIISGNKNLCYANTINWKKLFGTSGQKTKIISNRGENSCKATGQTPSDLDPCCLTLSLILVVILVLLTVLALLS (SEQ ID NO:97) |
| M036 | eTAG GHR transcript variant 1 NM_000163_4 | MLLLVTSLLLCELPHPAFLLIPRKVCNGIGIGEFKDSLSINATNIKHFKNCTSISGDLHILPVAFRGDSFTHTPPLDPQELDILKTVKEITGFLLIQAWPENRTDLHAFENLEIIRGRTKQHGQFSLAVVSLNITSLGLRSLKEISDGDVIISGNKNLCYANTINWKKLFGTSGQKTKIISNRGENSCKATGQVCHALCSPEGCWGPEPRDCVSCRNVSRGRECVDKCNLLEGEPREFVENSECIQCHPECLPQAMNITCTGRGPDNCIQCAHYIDGPHCVKTCPAGVMGENNTLVWKYADAGHVCHLCHPNCTYGCTGPGLEGCPTNGTLPQMSQFTCCEDFYFPWLLCIIFGIFGLTVMLFVFLFS (SEQ ID NO:98) |
| M037 | eTAG GHR transcript variant 1 NM_000163_4 | MLLLVTSLLLCELPHPAFLLIPRKVCNGIGIGEFKDSLSINATNIKHFKNCTSISGDLHILPVAFRGDSFTHTPPLDPQELDILKTVKEITGFLLIQAWPENRTDLHAFENLEIIRGRTKQHGQFSLAVVSLNITSLGLRSLKEISDGDVIISGNKNLCYANTINWKKLFGTSGQKTKIISNRGENSCKATGQTLPQMSQFTCCEDFYFPWLLCIIFGIFGLTVMLFVFLFS (SEQ ID NO:99) |
| M042 | eTAG truncated after Fn F523C IL27RA NM_004843_3 | MLLLVTSLLLCELPHPAFLLIPRKVCNGIGIGEFKDSLSINATNIKHFKNCTSISGDLHILPVAFRGDSFTHTPPLDPQELDILKTVKEITGFLLIQAWPENRTDLHAFENLEIIRGRTKQHGQFSLAVVSLNITSLGLRSLKEISDGDVIISGNKNLCYANTINWKKLFGTSGQKTKIISNRGENSCKATGQVCHALCSPEGCWGPEPRDCVSCRNVSRGRECVDKCNLLEGEPREFVENSECIQCHPECLPQAMNITCTGRGPDNCIQCAHYIDGPHCVKTCPAGVMGENNTLVWKYADAGHVCHLCHPNCTYGCTGPGLEGCPTNGHLPDNTLRWKVLPGILCLWGLFLLGCGLSLA (SEQ ID NO:100) |
| M043 | eTAG truncated after Fn F523C IL27RA NM_004843_3 | MLLLVTSLLLCELPHPAFLLIPRKVCNGIGIGEFKDSLSINATNIKHFKNCTSISGDLHILPVAFRGDSFTHTPPLDPQELDILKTVKEITGFLLIQAWPENRTDLHAFENLEIIRGRTKQHGQFSLAVVSLNITSLGLRSLKEISDGDVIISGNKNLCYANTINWKKLFGTSGQKTKIISNRGENSCKATGQHLPDNTLRWKVLPGILCLWGLFLLGCGLSLA (SEQ ID NO:101) |
| M048 | eTAG truncated after Fn S505N MPL NM_005373_2 | MLLLVTSLLLCELPHPAFLLIPRKVCNGIGIGEFKDSLSINATNIKHFKNCTSISGDLHILPVAFRGDSFTHTPPLDPQELDILKTVKEITGFLLIQAWPENRTDLHAFENLEIIRGRTKQHGQFSLAVVSLNITSLGLRSLKEISDGDVIISGNKNLCYANTINWKKLFGTSGQKTKIISNRGENSCKATGQVCHALCSPEGCWGPEPRDCVSCRNVSRGRECVDKCNLLEGEPREFVENSECIQCHPECLPQAMNITCTGRGPDNCIQCAHYIDGPHCVKTCPAGVMGENNTLVWKYADAGHVCHLCHPNCTYGCTGPGLEGCPTNGETATETAWISLVTALHLVLGLNAVLGLLLL (SEQ ID NO:102) |
| M049 | eTAG truncated after Fn S505N MPL NM_005373_2 | MLLLVTSLLLCELPHPAFLLIPRKVCNGIGIGEFKDSLSINATNIKHFKNCTSISGDLHILPVAFRGDSFTHTPPLDPQELDILKTVKEITGFLLIQAWPENRTDLHAFENLEIIRGRTKQHGQFSLAVVSLNITSLGLRSLKEISDGDVIISGNKNLCYANTINWKKLFGTSGQKTKIISNRGENSCKATGQETATETAWISLVTALHLVLGLNAVLGLLLL (SEQ ID NO:103) |
| E006 | eTag 0A JUN NM_002228_3 | MLLLVTSLLLCELPHPAFLLIPRKVCNGIGIGEFKDSLSINATNIKHFKNCTSISGDLHILPVAFRGDSFTHTPPLDPQELDILKTVKEITGFLLIQAWPENRTDLHAFENLEIIRGRTKQHGQFSLAVVSLNITSLGLRSLKEISDGDVIISGNKNLCYANTINWKKLFGTSGQKTKIISNRGENSCKATGQVCHALCSPEGCWGPEPRDCVSCRNVSRGRECVDKCNLLEGEPREFVENSECIQCHPECLPQAMNITCTGRGPDNCIQCAHYIDGPHCVKTCPAGVMGENNTLVWK |
| | | YADAGHVCHLCHPNCTYGCTGPGLEGCPTNGLERIARLEEKVKTLKAQNSELASTANMLREQVAQLKQKV (SEQ ID NO:104) |
| E007 | eTag 1A JUN NM_002228_3 | MLLLVTSLLLCELPHPAFLLIPRKVCNGIGIGEFKDSLSINATNIKHFKNCTSISGDLHILPVAFRGDSFTHTPPLDPQELDILKTVKEITGFLLIQAWPENRTDLHAFENLEIIRGRTKQHGQFSLAVVSLNITSLGLRSLKEISDGDVIISGNKNLCYANTINWKKLFGTSGQKTKIISNRGENSCKATGQVCHALCSPEGCWGPEPRDCVSCRNVSRGRECVDKCNLLEGEPREFVENSECIQCHPECLPQAMNITCTGRGPDNCIQCAHYIDGPHCVKTCPAGVMGENNTLVWKYADAGHVCHLCHPNCTYGCTGPGLEGCPTNGLERIARLEEKVKTLKAQNSELASTANMLREQVAQLKQKVA (SEQ ID NO:105) |
| E008 | eTag 2A JUN NM_002228_3 | MLLLVTSLLLCELPHPAFLLIPRKVCNGIGIGEFKDSLSINATNIKHFKNCTSISGDLHILPVAFRGDSFTHTPPLDPQELDILKTVKEITGFLLIQAWPENRTDLHAFENLEIIRGRTKQHGQFSLAVVSLNITSLGLRSLKEISDGDVIISGNKNLCYANTINWKKFGTSGQKTKIISNRGENSCKATGQVCHALCSPEGCWGPEPRDCVSCRNVSRGRECVDKCNLLEGEPREFVENSECIQCHPECLPQAMNITCTGRGPDNCIQCAHYIDGPHCVKTCPAGVMGENNTLVWKYADAGHVCHLCHPNCTYGCTGPGLEGCPTNGLERIARLEEKVKTLKAQNSELASTANMLREQVAQLKQKVAA (SEQ ID NO:106) |
| E009 | eTag 3A JUN NM_002228_3 | MLLLVTSLLLCELPHPAFLLIPRKVCNGIGIGEFKDSLSINATNIKHFKNCTSISGDLHILPVAFRGDSFTHTPPLDPQELDILKTVKEITGFLLIQAWPENRTDLHAFENLEIIRGRTKQHGQFSLAVVSLNITSLGLRSLKEISDGDVIISGNKNLCYANTINWKKLFGTSGQKTKIISNRGENSCKATGQVCHALCSPEGCWGPEPRDCVSCRNVSRGRECVDKCNLLEGEPREFVENSECIQCHPECLPQAMNITCTGRGPDNCIQCAHYIDGPHCVKTCPAGVMGENNTLVWKYADAGHVCHLCHPNCTYGCTGPGLEGCPTNGLERIARLEEKVKTLKAQNSELASTANMLREQVAQLKQKVAAA (SEQ ID NO:107) |
| E010 | eTag 4A JUN NM_002228_3 | MLLLVTSLLLCELPHPAFLLIPRKVCNGIGIGEFKDSLSINATNIKHFKNCTSISGDLHILPVAFRGDSFTHTPPLDPQELDILKTVKEITGFLLIQAWPENRTDLHAFENLEIIRGRTKQHGQFSLAVVSLNITSLGLRSLKEISDGDVIISGNKNLCYANTINWKKLFGTSGQKTKIISNRGENSCKATGQVCHALCSPEGCWGPEPRDCVSCRNVSRGRECVDKCNLLEGEPREFVENSECIQCHPECLPQAMNITCTGRGPDNCIQCAHYIDGPHCVKTCPAGVMGENNTLVWKYADAGHVCHLCHPNCTYGCTGPGLEGCPTNGLERIARLEEKVKTLKAQNSELASTANMLREQVAQLKQKVAAAA (SEQ ID NO:108) |
| E011 | Myc Tag 0A JUN NM_002228_3 | MTILGTTFGMVFSLLQVVSGEQKLISEEDLLERIARLEEKVKTLKAQNSELASTANMLREQVAQLKQKV (SEQ ID NO:109) |
| E012 | Myc Tag 1A JUN NM_002228_3 | MTILGTTFGMVFSLLQVVSGEQKLISEEDLLERIARLEEKVKTLKAQNSELASTANMLREQVAQLKQKVA (SEQ ID NO:110) |
| E013 | Myc Tag 2A JUN NM_002228_3 | MTILGTTFGMVFSLLQVVSGEQKLISEEDLLERIARLEEKVKTLKAQNSELASTANMLREQVAQLKQKVAA (SEQ ID NO:111) |
| E014 | Myc Tag 3A JUN NM_002228_3 | MTILGTTFGMVFSLLQVVSGEQKLISEEDLLERIARLEEKVKTLKAQNSELASTANMLREQVAQLKQKVAAA (SEQ ID NO:112) |
| E015 | Myc Tag 4A JUN NM_002228_3 | MTILGTTFGMVFSLLQVVSGEQKLISEEDLLERIARLEEKVKTLKAQNSELASTANMLREQVAQLKQKVAAAA (SEQ ID NO:113) |
| E016 | 0A JUN NM_002228_3 | LERIARLEEKVKTLKAQNSELASTANMLREQVAQLKQKV |
| T001 | CD2 transcript variant 1 NM_001328609_1 | LIIGICGGGSLLMVFVALLVFYI (SEQ ID NO:114) |
| T002 | CD3D transcript variant 1 NM_000732_4 | GIIVTDVIATLLLALGVFCFA (SEQ ID NO:115) |
| T003 | CD3E NM_000733_3 | VMSVATIVIVDICITGGLLLLVYYWS (SEQ ID NO:116) |
| T004 | CD3G NM_000073_2 | GFLFAEIVSIFVLAVGVYFIA (SEQ ID NO:117) |
| T005 | CD3Z CD247 transcript variant 1 NM_198053_2 | LCYLLDGILFIYGVILTALFL (SEQ ID NO:118) |
| T006 | CD4 transcript variant 1 and 2 NM_000616_4 | MALIVLGGVAGLLLFIGFIGLGIFF (SEQ ID NO:119) |
| T007 | CD8A transcript variant 1 NM_001768_6 | IYIWAPLAGTCGVLLLSLVIT (SEQ ID NO:120) |
| T008 | CD8B transcript variant 2 NM_17223 | LGLLVAGVLVLLVSLGVAIHLCC (SEQ ID NO:121) |
| T009 | CD27 NM_001242_4 | ILVIFSGMFLVFTLAGALFLH (SEQ ID NO:122) |
| T010 | CD28 transcript variant 1 NM_006139_3 | FWVLVVVGGVLACYSLLVTVAFIIFWV (SEQ ID NO:123) |
| T011 | CD40 transcript variant 1 and 6 NM_001250_5 | ALVVIPIIFGILFAILLVLVFI (SEQ ID NO:124) |
| T012 | CD79A transcript variant 1 NM_001783_3 | \|\|TAEGIILLFCAVVPGTLLLF (SEQ ID NO:125) |
| T013 | CD79B transcript variant 3 NM_001039933_2 | GIIMIQTLLIILFIIVPIFLLL (SEQ ID NO:126) |
| T014 | CRLF2 transcript variant 1 NM_0221483 | FILISSLAILLMVSLLLLSLW (SEQ ID NO:127) |
| T015 | CRLF2 transcript variant 1 NM_022148_3 | CILISSLAILLMVSLLLLSLW (SEQ ID NO:128) |
| T016 | CSF2RA transcript variant 7 and 8 NM_001161529_1 | NLGSVYIYVLLIVGTLVCGIVLGFLF (SEQ ID NO:129) |
| T017 | CSF2RB NM_000395_2 | MWVLALIVIFLTIAVLLAL (SEQ ID NO:130) |
| T018 | CSF2RB NM_000395_2 | MWVLALIEIFLTIAVLLAL (SEQ ID NO:131) |
| T019 | CSF3R transcript variant 1 NM_000760_3 | IILGLFGLLLLLTCLCGTAWLCC (SEQ ID NO:132) |
| T020 | CSF3R transcript variant 1 NM_000760_3 | IILGLFGLLLLLNCLCGTAWLCC (SEQ ID NO:133) |
| T021 | EPOR transcript variant 1 NM_000121_3 | LILTLSLILVVILVLLTVLALLS (SEQ ID NO:134) |
| T022 | EPOR transcript variant 1 NM_000121_3 | CCLTLSLILVVILVLLTVLALLS (SEQ ID NO:135) |
| T023 | FCER1G NM_004106_1 | LCYILDAILFLYGIVLTLLYC (SEQ ID NO:136) |
| T024 | FCGR2C NM_201563_5 | IIVAVVTGIAVAAIVAAVVALIY (SEQ ID NO:137) |
| T025 | FCGRA2 transcript variant 1 NM_001136219_1 | IIVAVVIATAVAAIVAAVVALIY (SEQ ID NO:138) |
| T026 | GHR transcript variant 1 NM_000163_4 | FPWLLIIIFGIFGLTVMLFVFLFS (SEQ ID NO:139) |
| T027 | GHR transcript variant 1 NM_000163_4 | FPWLLCIIFGIFGLTVMLFVFLFS (SEQ ID NO:140) |
| T028 | ICOS NM_012092.3 | FWLPIGCAAFVVVCILGCILI (SEQ ID NO:141) |
| T029 | IFNAR1 NM_000629_2 | IWLIVGICIALFALPFVIYAA (SEQ ID NO:142) |
| T030 | IFNAR2 transcript variant 1 NM_207585_2 | IGGIITVFLIALVLTSTIVTL (SEQ ID NO:143) |
| T031 | IFNGR1 NM_000416_2 | SLWIPVVAALLLFLVLSLVFI (SEQ ID NO:144) |
| T032 | IFNGR2 transcript variant 1 NM_001329128_1 | VILISVGTFSLLSVLAGACFF (SEQ ID NO:145) |
| T033 | IFNLR1 NM_170743_3 | FLVLPSLLILLLVIAAGGVIW (SEQ ID NO:146) |
| T034 | IL1R1 transcript variant 2 NM_001288706_1 | HMIGICVTLTVIIVCSVFIYKIF (SEQ ID NO:147) |
| T035 | IL1RAP transcript variant 1 NM_002182_3 | VLLVVILIVVYHVYWLEMVLF (SEQ ID NO:148) |
| T036 | IL1RL1 transcript variant 1 NM_016232.4 | IYCIIAVCSVFLMLINVLVII (SEQ ID NO:149) |
| T037 | IL1RL2 NM_003854.2 | AYLIGGLIALVAVAVSVVYIY (SEQ ID NO:150) |
| T038 | IL2RA transcript variant 1 NM_000417_2 | VAVAGCVFLLISVLLLSGL (SEQ ID NO:151) |
| T039 | IL2RB transcript variant 1 NM_000878_4 | IPWLGHLLVGLSGAFGFIILVYLLI (SEQ ID NO:152) |
| T040 | IL2RG NM_000206_2 | VVISVGSMGLIISLLCVYFWL (SEQ ID NO:153) |
| T041 | IL3RA transcript variant 1 and 2 NM_002183_3 | TSLLIALGTLLALVCVFVIC (SEQ ID NO:154) |
| T042 | IL4R transcript variant 1 NM_000418_3 | LLLGVSVSCIVILAVCLLCYVSIT (SEQ ID NO:155) |
| T043 | IL5RA transcript variant 1 NM_000564_4 | FVIVIMATICFILLILSLIC (SEQ ID NO:156) |
| T044 | IL6R transcript variant 1 NM_000565_3 | TFLVAGGSLAFGTLLCIAIVL (SEQ ID NO:157) |
| T045 | IL6ST transcript variant 1 and 3 NM_002184_3 | AIVVPVCLAFLLTTLLGVLFCF (SEQ ID NO:158) |
| T046 | IL7RA NM_002185_3 | ILLTISILSFFSVALLVILACVL (SEQ ID NO:159) |
| T047 | IL7RA Ins PPCL (interleukin 7 receptor) | ILLPPCLTISILSFFSVALLVILACVL (SEQ ID NO:160) |
| T048 | IL9R transcript variant 1 NM_002186_2 | GNTLVAVSIFLLLTGPTYLLF (SEQ ID NO:161) |
| T049 | IL10RA transcript variant 1 NM_001558_3 | VIIFFAFVLLLSGALAYCLAL (SEQ ID NO:162) |
| T050 | IL10RB NM_000628_4 | WMVAVILMASVFMVCLALLGCF (SEQ ID NO:163) |
| T051 | IL11RA NM_001142784_2 | SLGILSFLGLVAGALALGLWL (SEQ ID NO:164) |
| T052 | IL12RB1 transcript variant 1 and 4 NM_005535_2 | WLIFFASLGSFLSILLVGVLGYLGL (SEQ ID NO:165) |
| T053 | IL12RB2 transcript variant 1 and 3 NM_001559_2 | WMAFVAPSICIAIIMVGIFST (SEQ ID NO:166) |
| T054 | IL13RA1 NM_001560_2 | LYITMLLIVPVIVAGAIIVLLLYL (SEQ ID NO:167) |
| T055 | IL13RA2 NM_000640_2 | FWLPFGFILILVIFVTGLLL (SEQ ID NO:168) |
| T056 | IL15RA transcript variant 4 NM_001256765_1 | VAISTSTVLLCGLSAVSLLACYL (SEQ ID NO:169) |
| T057 | IL17RA NM_014339_6 | VYWFITGISILLVGSVILLIV (SEQ ID NO:170) |
| T058 | IL17RB NM_018725_3 | LLLLSLLVATWVLVAGIYLMW (SEQ ID NO:171) |
| T059 | IL17RC transcript variant 1 NM_153460_3 | WALVWLACLLFAAALSLILLL (SEQ ID NO:172) |
| T060 | IL17RD transcript variant 2 NM_017563_4 | AVAITVPLVVISAFATLFTVM (SEQ ID NO:173) |
| T061 | IL17RE transcript variant 1 NM_153480_1 | LGLLILALLALLTLLGVVLAL (SEQ ID NO:174) |
| T062 | IL18R1 transcript variant 1 NM_003855_3 | GMIIAVLILVAVVCLVTVCVI (SEQ ID NO:175) |
| T063 | IL18RAP NM_003853_3 | GVVLLYILLGTIGTLVAVLAA (SEQ ID NO:176) |
| T064 | IL20RA transcript variant 1 NM_014432_3 | IIFWYVLPISITVFLFSVMGY (SEQ ID NO:177) |
| T065 | IL20RB NM_144717_3 | VLALFAFVGFMLILVVVPLFV (SEQ ID NO:178) |
| T066 | IL21R transcript variant 2 NM_181078_2 | GWNPHLLLLLLLVIVFIPAFW (SEQ ID NO:179) |
| T067 | IL22RA1 NM_021258_3 | YSFSGAFLFSMGFLVAVLCYL (SEQ ID NO:180) |
| T068 | IL23R NM_144701_2 | LLLGMIVFAVMLSILSLIGIF (SEQ ID NO:181) |
| T069 | IL27RA NM_004843_3 | VLPGILFLWGLFLLGCGLSLA (SEQ ID NO:182) |
| T070 | IL27RA NM_004843_3 | VLPGILCLWGLFLLGCGLSLA (SEQ ID NO:183) |
| T071 | IL31RA transcript variant 1 NM_139017_5 | IILITSLIGGGLLILIILTVAYGL (SEQ ID NO:184) |
| T072 | LEPR transcript variant 1 NM_002303_5 | AGLYVIVPVIISSSILLLGTLLI (SEQ ID NO:185) |
| T073 | LIFR NM_001127671_1 | VGLIIAILIPVAVAVIVGVVTSILC (SEQ ID NO:186) |
| T074 | MPL NM_005373_2 | ISLVTALHLVLGLSAVLGLLLL (SEQ ID NO:187) |
| T075 | MPL NM_005373_2 | ISLVTALHLVLGLNAVLGLLLL (SEQ ID NO:188) |
| T076 | OSMR transcript variant 4 NM_001323505_1 | LIHILLPMVFCVLLIMVMCYL (SEQ ID NO:189) |
| T077 | PRLR transcript variant 1 NM_000949_6 | TTVWISVAVLSAVICLIIVWAVAL (SEQ ID NO:190) |
| T078 | TNFRSF4 NM_003327_3 | VAAILGLGLVLGLLGPLAILL (SEQ ID NO:191) |
| T079 | TNFRSF8 transcript variant 1 NM_001243_4 | PVLDAGPVLFWVILVLVVVVGSSAFLLC (SEQ ID NO:192) |
| T080 | TNFRSF9 NM_001561_5 | IISFFLALTSTALLFLLFFLTLRFSVV (SEQ ID NO:193) |
| T081 | TNFRSF14 transcript variant 1 NM_003820_3 | WWFLSGSLVIVIVCSTVGLII (SEQ ID NO:194) |
| T082 | TNFRSF18 transcript variant 1 NM_004195_2 | LGWLTVVLLAVAACVLLLTSA (SEQ ID NO:195) |
| S036 | CD2 transcript variant 1 NM_001328609_1 | TKRKKQRSRRNDEELETRAHRVATEERGRKPHQIPASTPQNPATSQHPPPPPGHRSQAPSHRPPPPGHRVQHQPQKRPPAPSGTQVHQQKGPPLPRPRVQPKPPHGAAENSLSPSSN (SEQ ID NO:196) |
| S037 | CD3D transcript variant 1 NM_000732_4 | GHETGRLSGAADTQALLRNDQVYQPLRDRDDAQYSHLGGNWARNK (SEQ ID NO:197) |
| S038 | CD3E NM_000733_3 | KNRKAKAKPVTRGAGAGGRQRGQNKERPPPVPNPDYEPIRKGQRDLYSGLNQRRI (SEQ ID NO:198) |
| S039 | CD3G NM_000073_2 | GQDGVRQSRASDKQTLLPNDQLYQPLKDREDDQYSHLQGNQLRRN (SEQ ID NO:199) |
| S042 | CD4 transcript variant 1 and 2 NM_000616_4 | CVRCRHRRRQAERMSQIKRLLSEKKTCQCPHRFQKTCSPI (SEQ ID NO:200) |
| S043 | CD8A transcript variant 1 NM_001768_6 | LYCNHRNRRRVCKCPRPVVKSGDKPSLSARYV (SEQ ID NO:201) |
| S044 | CD8B transcript variant 2 NM_172213_3 | RRRRARLRFMKQPQGEGISGTFVPQCLHGYYSNTTTSQKLLNPWILKT (SEQ ID NO:202) |
| S045 | CD8B transcript variant 3 NM_172101_3 | RRRRARLRFMKQLRLHPLEKCSRMDY (SEQ ID NO:203) |
| S046 | CD8B transcript variant 5 NM_004931_4 | RRRRARLRFMKQFYK (SEQ ID NO:204) |
| S047 | CD27 NM_001242_4 | QRRKYRSNKGESPVEPAEPCRYSCPREEEGSTIPIQEDYRKPEPACSP (SEQ ID NO:205) |
| S048 | mutated Delta Lck CD28 transcript variant 1 NM_006139_3 | RSKRSRLLHSDYMNMTPRRPGPTRKHYQAYAAARDFAAYRS (SEQ ID NO:206) |
| S049 | CD28 transcript variant 1 NM_006139_3 | RSKRSRLLHSDYMNMTPRRPGPTRKHYQPYAPPRDFAAYRS (SEQ ID NO:207) |
| S050 | CD40 transcript variant 1 and 6 NM_001250_5 | KKVAKKPTNKAPHPKQEPQEINFPDDLPGSNTAAPVQETLHGCQPVTQEDGKESRISVQERQ (SEQ ID NO:208) |
| S051 | CD40 transcript variant 5 NM_001322421_1 | SESSEKVAKKPTNKAPHPKQEPQEINFPDDLPGSNTAAPVQETLHGCQPVTQEDGKESRISVQERQ (SEQ ID NO:209) |
| S052 | CD79A transcript variant 1 NM_001783_3 | RKRWQNEKLGLDAGDEYEDENLYEGLNLDDCSMYEDISRGLQGTYQDVGSLNIGDVQLEKP (SEQ ID NO:210) |
| S053 | CD79B transcript variant 3 NM_001039933_2 | LDKDDSKAGMEEDHTYEGLDIDQTATYEDIVTLRTGEVKWSVGEHPGQE (SEQ ID NO:211) |
| S054 | CRLF2 transcript variant 1 NM_022148_3 | KLWRVKKFLIPSVPDPKSIFPGLFEIHQGNFQEWITDTQNVAHLHKMAGAEQESGPEEPLVVQLAKTEAESPR [sequence omitted] (SEQ ID NO:212) |
| S057 | CSF2RB NM_000395_2 | RFCGIYGYRLRRKWEEKIPNPSKSHLFQNGSAELWPPGSMSAFTSGSPPHQGPWGSRFPELEGVFPVGFGDSEVSPLTIEDPKHVCDPPSGPDTTPAASDLPTEQPPSPQPGPPAASHTPEKQASSFDFNGPYLGPPHSRSLPDILGQPEPPQEGGSQKSPPPGSLEYLCLPAGGQVQLVPLAQAMGPGQAVEVERRPSQGAAGSPSLESGGGPAPPALGPRVGGQDQKDSPVAIPMSSGDTEDPGVASGYVSSADLVFTPNSGASSVSLVPSLGLPSDQTPSLCPGLASGPPGAPGPVKSGFEGYVELPPIEGRSPRSPRNNPVPPEAKSPVLNPGERPADVSPTSPQPEGLLVLQQVGD YCFLPGLGPGPLSLRSKPSSPGPGPEIKNLDQAFQVKKPPGQAVPQVPVIQLFKALKQQDYLSLPPWEVNKPGEVC (SEQ ID NO:213) |
| S058 | CSF2RA transcript variant 7 and 8 NM_001161529_1 | KRFLRIQRLFPPVPQIKDKLNDNHEVEDEIIWEEFTPEEGKGYREEVLTVKEIT (SEQ ID NO:214) |
| S059 | CSF2RA transcript variant 9 NM_001161531_1 | KRFLRIQRLFPPVPQIKDKLNDNHEVEDEMGPQRHHRCGWNLYPTPGPSPGSGSSPRLGSESSL (SEQ ID NO:215) |
| S062 | CSF3R transcript variant 1 NM_000760_3 | SPNRKNPLWPSVPDPAHSSLGSWVPTIMEEDAFQLPGLGTPPITKLTVLEEDEKKPVPWESHNSSETCGLPTLVQTYVLQGDPRAVSTQPQSQSGTSDQVLYGQLLGSPTSPGPGHYLRCDSTQPLLAGLTPSPKSYENLWFQASPLGTLVTPAPSQEDDCVFGPLLNFPLLQGIRVHGMEALGSF (SEQ ID NO:216) |
| S063 | CSF3R transcript variant 3 NM_156039_3 | SPNRKNPLWPSVPDPAHSSLGSWVPTIMEELPGPRQGQWLGQTSEMSRALTPHPCVQDAFQLPGLGTPPITKLTVLEEDEKKPVPWESHNSSETCGLPTLVQTYVLQGDPRAVSTQPQSQSGTSDQVLYGQLLGSPTSPGPGHYLRCDSTQPLLAGLTPSPKSYENLWFQASPLGTLVTPAPSQEDDCVFGPLLNFPLLQGIRVHGMEALGSF (SEQ ID NO:217) |
| S064 | CSF3R transcript variant 4 NM_172313_2 | SPNRKNPLWPSVPDPAHSSLGSWVPTIMEEDAFQLPGLGTPPITKLTVLEEDEKKPVPWESHNSSETCGLPTLVQTYVLQGDPRAVSTQPQSQSGTSDQAGPPRRSAYFKDQIMLHPAPPNGLLCLFPITSVL (SEQ ID NO:218) |
| S069 | EPOR transcript variant 1 NM_000121_3 | HRRALKQKIWPGIPSPESEFEGLFTTHKGNFQLWLYQNDGCLWWSPCTPFTEDPPASLEVLSERCWGTMQAVEPGTDDEGPLLEPVGSEHAQDTYLVLDKWLLPRNPPSEDLPGPGGSVDIVAMDEGSEASSCSSALASKPSPEGASAASFEYTILDPSSQLLRPWTLCPELPPTPPHLKYLYLVVSDSGISTDYSSGDSQGAQGGLSDGPYSNPYENSLIPAAEPLPPSYVACS (SEQ ID NO:219) |
| S072 | EPOR transcript variant 1 NM_000121_3 | HRRALKQKIWPGIPSPESEFEGLFTTHKGNFQLWLYQNDGCLWWSPCTPFTEDPPASLEVLSERCWGTMQAVEPGTDDEGPLLEPVGSEHAQDTYLVLDKWLLPRNPPSEDLPGPGGSVDIVAMDEGSEASSCSSALASKPSPEGASAASFEYTILDPSSQLLRPWTLCPELPPTPPHLKFLFLVVSDSGISTDYSSGDSQGAQGGLSDGPYSNPYENSLIPAAEPLPPSYVACS (SEQ ID NO:220) |
| S074 | FCER1G NM_004106_1 | RLKIQVRKAAITSYEKSDGVYTGLSTRNQETYETLKHEKPPQ (SEQ ID NO:221) |
| S075 | FCGR2C NM_201563_5 | CRKKRISANSTDPVKAAQFEPPGRQMIAIRKRQPEETNNDYETADGGYMTLNPRAPTDDDKNIYLTLPPNDHVNSNN (SEQ ID NO:222) |
| S076 | FCGRA2 transcript variant 1 NM_001136219_1 | CRKKRISANSTDPVKAAQFEPPGRQMIAIRKRQLEETNNDYETADGGYMTLNPRAPTDDDKNIYLTLPPNDHVNSNN (SEQ ID NO:223) |
| S077 | GHR transcript variant 1 NM_000163_4 | KQQRIKMLILPPVPVPKIKGIDPDLLKEGKLEEVNTILAIHDSYKPEFHSDDSWVEFIELDIDEPDEKTEESDTDRLLSSDHEKSHSNLGVKDGDSGRTSCCEPDILETDFNANDIHEGTSEVAQPQRLKGEADLLCLDQKNQNNSPYHDACPATQQPSVIQAEKNKPQPLPTEGAESTHQAAHIQLSNPSSLSNIDFYAQVSDITPAGSVVLSPGQKNKAGMSQCDMHPEMVSLCQENFLMDNAYFCEADAKKCIPVAPHIKVESHIQPSLNQEDIYITTESLTTAAGRPGTGEHVPGSEMPVPDYTSIHIVQSPQGLILNATALPLPDKEFLSSCGYVSTDQLNKIMP (SEQ ID NO:224) |
| S080 | ICOS NM_012092.3 | CWLTKKKYSSSVHDPNGEYMFMRAVNTAKKSRLTDVTL (SEQ ID NO:225) |
| S081 | IFNAR1 NM_000629_2 | KVFLRCINYVFFPSLKPSSSIDEYFSEQPLKNLLLSTSEEQIEKCFIIENISTIATVEETNQTDEDHKKYSSQTSQDSGNYSNEDESESKTSEELQQDFV (SEQ ID NO:226) |
| S082 | IFNAR2 transcript variant 1 NM_207585_2 | KWIGYICLRNSLPKVLNFHNFLAWPFPNLPPLEAMDMVEVIYINRKKKVWDYNYDDESDSDTEAAPRTSGGGYTMHGLTVRPLGQASATSTESQLIDPESEEEPDLPEVDVELPTMPKDSPQQLELLSGPCERRKSPLQDPFPEEDYSSTEGSGGRITFNVDLNSVFLRVLDDEDSDDLEAPLMLSSHLEEMVDPEDPDNVQSNHLLASGEGTQPTFPSPSSEGLWSEDAPSDQSDTSESDVDLGDGYIMR (SEQ ID NO:227) |
| S083 | IFNAR2 transcript variant 2 NM_000874_4 | KWIGYICLRNSLPKVLRQGLAKGWNAVAIHRCSHNALQSETPELKQSSCLSFPSSWDYKRASLCPSD (SEQ ID NO:228) |
| S084 | IFNGR1 NM_000416_2 | CFYIKKINPLKEKSIILPKSLISVVRSATLETKPESKYVSLITSYQPFSLEKEVVCEEPLSPATVPGMHTEDNPGKVEHTEELSSITEVVTTEENIPDVVPGSHLTPIERESSSPLSSNQSEPGSIALNSYHSRNCSESDHSRNGFDTDSSCLESHSSLSDSEFPPNNKGEIKTEGQELITVIKAPTSFGYDKPHVLVDLLVDDSGKESLIGYRPTEDSKEFS (SEQ ID NO:229) |
| S085 | IFNGR2 transcript variant 1 NM_001329128_1 | LVLKYRGLIKYWFHTPPSIPLQIEEYLKDPTQPILEALDKDSSPKDDVWDSVSIISFPEKEQEDVLQTL (SEQ ID NO:230) |
| S086 | IFNLR1 NM_170743_3 | KTLMGNPWFQRAKMPRALDFSGHTHPVATFQPSRPESVNDLFLCPQKELTRGVRPTPRVRAPATQQTRWKKDLAEDEEEEDEEDTEDGVSFQPYIEPPSFLGQEHQAPGHSEAGGVDSGRPRAPLVPSEGSSAWDSSDRSWASTVDSSWDRAGSSGYLAEKGPGQGPGGDGHQESLPPPEFSKDSGFLEELPEDNLSSWATWGTLPPEPNLVPGGPPVSLQTLTFCWESSPEEEEEARESEIEDSDAGSWGAESTQRTEDRGRTLGHYMAR (SEQ ID NO:231) |
| S087 | IFNLR1 transcript variant 2 NM_173064_2 | KTLMGNPWFQRAKMPRALELTRGVRPTPRVRAPATQQTRWKKDLAEDEEEEDEEDTEDGVSFQPYIEPPSFLGQEHQAPGHSEAGGVDSGRPRAPLVPSEGSSAWDSSDRSWASTVDSSWDRAGSSGYLAEKGPGQGPGGDGHQESLPPPEFSKDSGFLEELPEDNLSSWATWGTLPPEPNLVPGGPPVSLQTLTFCWESSPEEEEEARESEIEDSDAGSWGAESTQRTEDRGRTLGHYMAR (SEQ ID NO:232) |
| S098 | IL1R1 transcript variant 2 NM_001288706_1 | KIDIVLWYRDSCYDFLPIKVLPEVLEKQCGYKLFIYGRDDYVGEDIVEVINENVKKSRRLIIILVRETSGFSWLGGSSEEQIAMYNALVQDGIKVVLLELEKIQDYEKMPESIKFIKQKHGAIRWSGDFTQGPQSAKTRFWKNVRYHMPVQRRSPSSKHQLLSPATKEKLQREAHVPLG (SEQ ID NO:233) |
| S099 | IL1R1 transcript variant 3 NM_001320978_1 | KIDIVLWYRDSCYDFLPIKASDGKTYDAYILYPKTVGEGSTSDCDIFVFKVLPEVLEKQCGYKLFIYGRDDYVGEDIVEVINENVKKSRRLIIILVRETSGFSWLGGSSEEQIAMYNALVQDGIKVVLLELEKlQDYEKMPESIKFIKQKHGAIRWSGDFTQGPQSAKTRFWKNVRYHMPVQRRSPSSKHQLLSPATKEKLQREAHVPLG (SEQ ID NO:234) |
| S100 | IL1RAP transcript variant 1 NM_002182_3 | YRAHFGTDETILDGKEYDIYVSYARNAEEEEFVLLTLRGVLENEFGYKLCIFDRDSLPGGIVTDETLSFIQKSRRLLVVLSPNYVLQGTQALLELKAGLENMASRGNINVILVQYKAVKETKVKELKRAKTVLTVIKWKGEKSKYPQGRFWKQLQVAMPVKKSPRRSSSDEQGLSYSSLKNV (SEQ ID NO:235) |
| S101 | IL1RAP transcript variant 6 NM_001167931_1 | YRAHFGTDETILDGKEYDIYVSYARNAEEEEFVLLTLRGVLENEFGYKLCIFDRDSLPGGNTVEAVFDFIQRSRRMIVVLSPDYVTEKSISMLEFKLGVMCQNSIATKLIVVEYRPLEHPHPGILQLKESVSFVSWKGEKSKHSGSKFWKALRLALPLRSLSASSGWNESCSSQSDISLDHVQRRRSRLKEPPELQSSERAAGSPPAPGTMSKHRGKSSATCRCCVTYCEGENHLRNKSRAEIHNQPQWETHLCKPVPQESETQWIQNGTRLEPPAPQISALALHHFTDLSNNNDFYIL (SEQ ID NO:236) |
| S102 | IL1RL1 transcript variant 1 NM_016232.4 | LKMFWIEATLLWRDIAKPYKTRNDGKLYDAYVVYPRNYKSSTDGASRVEHFVHQILPDVLENKCGYTLCIYGRDMLPGEDVVTAVETNIRKSRRHIFILTPQITHNKEFAYEQEVALHCALIQNDAKVILIEMEALSELDMLQAEALQDSLQHLMKVQGTIKWREDHIANKRSLNSKFWKHVRYQMPVPSKIPRKASSLTPLAAQKQ (SEQ ID NO:237) |
| S103 | IL1RL2 NM_003854.2 | NIFKIDIVLWYRSAFHSTETIVDGKLYDAYVLYPKPHKESQRHAVDALVLNILPEVLERQCGYKLFIFGRDEFPGQAVANVIDENVKLCRRLIVIVVPESLGFGLLKNLSEEQIAVYSALIQDGMKVILIELEKIEDYTVMPESIQYIKQKH |
| | | GAIRWHGDFTEQSQCMKTKFWKTVRYHMPPRRCRPFPPVQLLQHTPCYRTAGPELGSRRKKCTLTTG (SEQ ID NO:238) |
| S104 | IL2RA transcript variant 1 NM_000417_2 | TWQRRQRKSRRTI (SEQ ID NO:239) |
| S105 | IL2RB transcript variant 1 NM_000878_4 | NCRNTGPWLKKVLKCNTPDPSKFFSQLSSEHGGDVQKWLSSPFPSSSFSPGGLAPEISPLEVLERDKVTQLLLQQDKVPEPASLSSNHSLTSCFTNQGYFFFHLPDALEIEACQVYFTYDPYSEEDPDEGVAGAPTGSSPQPLQPLSGEDDAYCTFPSRDDLLLFSPSLLGGPSPPSTAPGGSGAGEERMPPSLQERVPRDWDPQPLGPPTPGVPDLVDFQPPPELVLREAGEEVPDAGPREGVSFPWSRPPGQGEFRALNARLPLNTDAYLSLQELQGQDPTHLV (SEQ ID NO:240) |
| S106 | IL2RG NM_000206_2 | ERTMPRIPTLKNLEDLVTEYHGNFSAWSGVSKGLAESLQPDYSERLCLVSElPPKGGALGEGPGASPCNQHSPYWAPPCYTLKPET (SEQ ID NO:241) |
| S109 | IL3RA transcript variant 1 and 2 NM_002183_3 | RRYLVMQRLFPRIPHMKDPIGDSFQNDKLVVWEAGKAGLEECLVTEVQVVQKT (SEQ ID NO:242) |
| S110 | IL4R transcript variant 1 NM_000418_3 | KIKKEWWDQIPNPARSRLVAIIIQDAQGSQWEKRSRGQEPAKCPHWKNCLTKLLPCFLEHNMKRDEDPHKAAKEMPFQGSGKSAWCPVEISKTVLWPESISVVRCVELFEAPVECEEEEEVEEEKGSFCASPESSRDDFQEGREGIVARLTESLFLDLLGEENGGFCQQDMGESCLLPPSGSTSAHMPWDEFPSAGPKEAPPWGKEQPLHLEPSPPASPTQSPDNLTCTETPLVIAGNPAYRSFSNSLSQSPCPRELGPDPLLARHLEEVEPEMPCVPQLSEPTTVPQPEPETWEQILRRNVLQHGAAAAPVSAPTSGYQEFVHAVEQGGTQASAVVGLGPPGEAGYKAFSSLLASSAVSPE KCGFGASSGEEGYKPFQDLIPGCPGDPAPVPVPLFTFGLDREPPRSPQSSHLPSSSPEHLGLEPGEKVEDMPKPPLPQEQATDPLVDSLGSGIVYSALTCHLCGHLKQCHGQEDGGQTPVMASPCCGCCCGDRSSPPTTPLRAPDPSPGGVPLEASLCPASLAPSGISEKSKSSSSFHPAPGNAQSSSQTPKIVNFVSVGPTYMRVS (SEQ ID NO:243) |
| S113 | IL4R transcript variant 1 NM_000418_3 | KIKKEWWDQIPNPARSRLVAIIIQDAQGSQWEKRSRGQEPAKCPHWKNCLTKLLPCFLEHNMKRDEDPHKAAKEMPFQGSGKSAWCPVEISKTVLWPESISVVRCVELFEAPVECEEEEEVEEEKGSFCASPESSRDDFQEGREGIVARLTESLFLDLLGEENGGFCQQDMGESCLLPPSGSTSAHMPWDEFPSAGPKEAPPWGKEQPLHLEPSPPASPTQSPDNLTCTETPLVIAGNPAYRSFSNSLSQSPCPRELGPDPLLARHLEEVEPEMPCVPQLSEPTTVPQPEPETWEQILRRNVLQHGAAAAPVSAPTSGYQEFVHAVEQGGTQASAVVGLGPPGEAGYKAFSSLLASSAVSPE KCGFGASSGEEGYKPFQDLIPGCPGDPAPVPVPLFTFGLDREPPRSPQSSHLPSSSPEHLGLEPGEKVEDMPKPPLPQEQATDPLVDSLGSGIVFSALTCHLCGHLKQCHGQEDGGQTPVMASPCCGCCCGDRSSPPTTPLRAPDPSPGGVPLEASLCPASLAPSGISEKSKSSSSFHPAPGNAQSSSQTPKIVNFVSVGPTYMRVS (SEQ ID NO:244) |
| S115 | IL5RA transcript variant 1 NM_000564_4 | KICHLWIKLFPPIPAPKSNIKDLFVTTNYEKAGSSETEIEVICYIEKPGVETLEDSVF (SEQ ID NO:245) |
| S116 | IL6R transcript variant 1 NM 000565 3 | RFKKTWKLRALKEGKTSMHPPYSLGQLVPERPRPTPVLVPLISPPVSPSSLGSDNTSSHNRPDARDPRSPYDISNTDYFFPR (SEQ ID NO:246) |
| S117 | IL6ST transcript variant 1 and 3 NM_002184_3 | NKRDLIKKHIWPNVPDPSKSHIAQWSPHTPPRHNFNSKDQMYSDGNFTDVSVVEIEANDKKPFPEDLKSLDLFKKEKINTEGHSSGIGGSSCMSSSRPSISSSDENESSQNTSSTVQYSTVVHSGYRHQVPSVQVFSRSESTQPLLDSEERPEDLQLVDHVDGGDGILPRQQYFKQNCSQHESSPDISHFERSKQVSSVNEEDFVRLKQQISDHISQSCGSGQMKMFQEVSAADAFGPGTEGQVERFETVGMEAATDEGMPKSYLPQTVRQGGYMPQ (SEQ ID NO:247) |
| S120 | IL7RA Isoform 1 NM_002185.4 | WKKRIKPIVWPSLPDHKKTLEHLCKKPRKNLNVSFNPESFLDCQIHRVDDIQARDEVEGFLQDTFPQQLEESEKQRLGGDVQSPNCPSEDVVITPESFGRDSSLTCLAGNVSACDAPILSSSRSLDCRESGKNGPHVYQDLLLSLGTTNSTLPPPFSLQSGILTLNPVAQGQPILTSLGSNQEEAYVTMSSFYQNQ (SEQ ID NO:248) |
| S121 | IL7RA Isoform 3 (C-term deletion) (interleukin 7 receptor) | WKKRIKPIVWPSLPDHKKTLEHLCKKPRKVSVFGA (SEQ ID NO:249) |
| S126 | IL9R transcript variant 1 NM_002186_2 | KLSPRVKRIFYQNVPSPAMFFQPLYSVHNGNFQTWMGAHGAGVLLSQDCAGTPQGALEPCVQEATALLTCGPARPWKSVALEEEQEGPGTRLPGNLSSEDVLPAGCTEWRVQTLAYLPQEDWAPTSLTRPAPPDSEGSRSSSSSSSSNNNNYCALGCYGGWHLSALPGNTQSSGPIPALACGLSCDHQGLETQQGVAWVLAGHCQRPGLHEDLQGMLLPSVLSKARSWTF (SEQ ID NO:250) |
| S129 | IL10RA transcript variant 1 NM_001558_3 | QLYVRRRKKLPSVLLFKKPSPFIFISQRPSPETQDTIHPLDEEAFLKVSPELKNLDLHGSTDSGFGSTKPSLQTEEPQFLLPDPHPQADRTLGNREPPVLGDSCSSGSSNSTDSGICLQEPSLSPSTGPTWEQQVGSNSRGQDDSGIDLVQNSEGRAGDTQGGSALGHHSPPEPEVPGEEDPAAVAFQGYLRQTRCAEEKATKTGCLEEESPLTDGLGPKFGRCLVDEAGLHPPALAKGYLKQDPLEMTLASSGAPTGQWNQPTEEWSLLALSSCSDLGISDWSFAHDLAPLGCVAAPGGLLGSFNSDLVTLPLISSLQSSE (SEQ ID NO:251) |
| S130 | IL10RB NM_000628_4 | ALLWCVYKKTKYAFSPRNSLPQHLKEFLGHPHHNTLLFFSFPLSDENDVFDKLSVIAEDSESGKQNPGDSCSLGTPPGQGPQS (SEQ ID NO:252) |
| S135 | IL11RA NM_001142784_2 | RLRRGGKDGSPKPGFLASVIPVDRRPGAPNL (SEQ ID NO:253) |
| S136 | IL12RB1 transcript variant 1 and 4 NM_005535_2 | NRAARHLCPPLPTPCASSAIEFPGGKETWQWINPVDFQEEASLQEALVVEMSWDKGERTEPLEKTELPEGAPELALDTELSLEDGDRCKAKM (SEQ ID NO:254) |
| S137 | IL12RB1 transcript variant 3 NM_001290023_1 | NRAARHLCPPLPTPCASSAIEFPGGKETWQWINPVDFQEEASLQEALVVEMSWDKGERTEPLEKTELPEGAPELALDTELSLEDGDRCDR (SEQ ID NO:255) |
| S138 | IL12RB2 transcript variant 1 and 3 NM_001559_2 | HYFQQKVFVLLAALRPQWCSREIPDPANSTCAKKYPIAEEKTQLPLDRLLIDWPTPEDPEPLVISEVLHQVTPVFRHPPCSNWPQREKGIQGHQASEKDMMHSASSPPPPRALQAESRQLVDLYKVLESRGSDPKPENPACPWTVLPAGDLPTHDGYLPSNIDDLPSHEAPLADSLEELEPQHISLSVFPSSSLHPLTFSCGDKLTLDQLKMRCDSLML (SEQ ID NO:256) |
| S141 | IL13RA1 NM_001560_2 | KRLKIIIFPPIPDPGKIFKEMFGDQNDDTLHWKKYDIYEKQTKEETDSVVLIENLKKASQ (SEQ ID NO:257) |
| S142 | IL13RA2 NM_000640_2 | RKPNTYPKMIPEFFCDT (SEQ ID NO:258) |
| S143 | IL15RA transcript variant 4 NM_001256765_1 | KSRQTPPLASVEMEAMEALPVTWGTSSRDEDLENCSHHL (SEQ ID NO:259) |
| S144 | IL17RA NM_014339_6 | CMTWRLAGPGSEKYSDDTKYTDGLPAADLIPPPLKPRKVWIIYSADHPLYVDVVLKFAQFLLTACGTEVALDLLEEQAISEAGVMTWVGRQKQEMVESNSKIIVLCSRGTRAKWQALLGRGAPVRLRCDHGKPVGDLFTAAMNMILPDFKRPACFGTYVVCYFSEVSCDGDVPDLFGAAPRYPLMDRFEEVYFRIQDLEMFQPGRMHRVGELSGDNYLRSPGGRQLRAALDRFRDWQVRCPDWFECENLYSADDQDAPSLDEEVFEEPLLPPGTGIVKRAPLVREPGSQACLAIDPLVGEEGGAAVAKLEPHLQPRGQPAPQPLHTLVLAAEEGALVAAVEPGPLADGAAVRLALAGEGEACPLLGSPGAGRNSVLFLPVDPEDSPLGSSTPMASPDLLPEDVREHLEGLMLSLFEQSLSCQAQGGCSRPAMVLTDPHTPYEEEQRQSVQSDQGYISRSSPQPPEGLTEMEEEEEEEQDPGKPALPLSPEDLESLRSLQRQLLFRQLQKNSGWDTMGSESEGPSA (SEQ ID NO:260) |
| S145 | IL17RB NM_018725_3 | RHERIKKTSFSTTTLLPPIKVLVVYPSEICFHHTICYFTEFLQNHCRSEVILEKWQKKKIAEMGPVQWLATQKKAADKVVFLLSNDVNSVCDGTCGKSEGSPSENSQDLFPLAFNLFCSDLRSQIHLHKYVVVYFREIDTKDDYNALSVCPKYHLMKDATAFCAELLHVKQQVSAGKRSQACHDGCCSL (SEQ ID NO:261) |
| S146 | IL17RC transcript variant 1 NM_153460_3 | KKDHAKGWLRLLKQDVRSGAAARGRAALLLYSADDSGFERLVGALASALCQLPLRVAVDLWSRRELSAQGPVAWFHAQRRQTLQEGGVVVLLFSPGAVALCSEWLQDGVSGPGAHGPHDAFRASLSCVLPDFLQGRAPGSYVGACFDRLLHPDAVPALFRTVPVFTLPSQLPDFLGALQQPRAPRSGRLQERAEQVSRALQPALDSYFHPPGTPAPGRGVGPGAGPGAGDGT (SEQ ID NO:262) |
| S147 | IL17RC transcript variant 4 NM_001203263_1 | 3KKDHAKAAARGRAALLLYSADDSGFERLVGALASALCQLPLRVAVDLWSRRELSAQGPVAWFHAQRRQTLQEGGVVVLLFSPGAVALCSEWLQDGVSGPGAHGPHDAFRASLSCVLPDFLQGRAPGSYVGACFDRLLHPDAVPALFRTVPVFTLPSQLPDFLGALQQPRAPRSGRLQERAEQVSRALQPALDSYFHPPGTPAPGRGVGPGAGPGAGDGT (SEQ ID NO:263) |
| S148 | IL17RD transcript variant 2 NM_017563_4 | CRKKQQENIYSHLDEESSESSTYTAALPRERLRPRPKVFLCYSSKDGQNHMNVVQCFAYFLQDFCGCEVALDLWEDFSLCREGQREWVIQKIHESQFIIVVCSKGMKYFVDKKNYKHKGGGRGSGKGELFLVAVSAIAEKLRQAKQSSSAALSKFIAVYFDYSCEGDVPGILDLSTKYRLMDNLPQLCSHLHSRDHGLQEPGQHTRQGSRRNYFRSKSGRSLYVAICNMHQFIDEEPDWFEKQFVPFHPPPLRYREPVLEKFDSGLVLNDVMCKPGPESDFCLKVEAAVLGATGPADSQHESQHGGLDQDGEARPALDGSAALQPLLHTVKAGSPSDMPRDSGIYDSSVPSSELSLPLMEG LSTDQTETSSLTESVSSSSGLGEEEPPALPSKLLSSGSCKADLGCRSYTDELHAVAPL (SEQ ID NO:264) |
| S149 | IL17RE transcript variant 1 NM_153480_1 | TCRRPQSGPGPARPVLLLHAADSEAQRRLVGALAELLRAALGGGRDVIVDLWEGRHVARVGPLPWLWAARTRVAREQGTVLLLWSGADLRPVSGPDPRAAPLLALLHAAPRPLLLLAYFSRLCAKGDIPPPLRALPRYRLLRDLPRLLRALDARPFAEATSWGRLGARQRRQSRLELCSRLEREAARLADLG (SEQ ID NO:265) |
| S154 | IL18R1 transcript variant 1 NM_003855_3 | YRVDLVLFYRHLTRRDETLTDGKTYDAFVSYLKECRPENGEEHTFAVEILPRVLEKHFGYKLCIFERDVVPGGAVVDEIHSLIEKSRRLIIVLSKSYMSNEVRYELESGLHEALVERKIKIILIEFTPVTDFTFLPQSLKLLKSHRVLKWKADKSLSYNSRFWKNLLYLMPAKTVKPGRDEPEVLPVLSES (SEQ ID NO:266) |
| S155 | IL18RAP NM_003853_3 | SALLYRHWIEIVLLYRTYQSKDQTLGDKKDFDAFVSYAKWSSFPSEATSSLSEEHLALSLFPDVLENKYGYSLCLLERDVAPGGVYAEDIVSIIKRSRRGIFILSPNYVNGPSIFELQAAVNLALDDQTLKLILIKFCYFQEPESLPHLVKKALRVLPTVTWRGLKSVPPNSRFWAKMRYHMPVKNSQGFTWNQLRITSRIFQWKGLSRTETTGRSSQPKEW (SEQ ID NO:267) |
| S156 | IL20RA transcript variant 1 NM_014432_3 | SIYRYIHVGKEKHPANLILIYGNEFDKRFFVPAEKIVINFITLNISDDSKISHQDMSLLGKSSDVSSLNDPQPSGNLRPPQEEEEVKHLGYASHLMEIFCDSEENTEGTSLTQQESLSRTIPPDKTVIEYEYDVRTTDICAGPEEQELSLQEEVSTQGTLLESQAALAVLGPQTLQYSYTPQLQDLDPLAQEHTDSEEGPEEEPSTTLVDWDPQTGRLCIPSLSSFDQDSEGCEPSEGDGLGEEGLLSRLYEEPAPDRPPGENETYLMQFMEEWGLYVQMEN (SEQ ID NO:268) |
| S157 | IL20RB NM_144717_3 | WKMGRLLQYSCCPVVVLPDTLKITNSPQKLISCRREEVDACATAVMSPEELLRAWIS (SEQ ID NO:269) |
| S158 | IL21R transcript variant 2 NM_181078_2 | SLKTHPLWRLWKKIWAVPSPERFFMPLYKGCSGDFKKWVGAPFTGSSLELGPWSPEVPSTLEVYSCHPPRSPAKRLQLTELQEPAELVESDGVPKPSFWPTAQNSGGSAYSEERDRPYGLVSIDTVTVLDAEGPCTWPCSCEDDGYPALDLDAGLEPSPGLEDPLLDAGTTVLSCGCVSAGSPGLGGPLGSLLDRLKPPLADGEDWAGGLPWGGRSPGGVSESEAGSPLAGLDMDTFDSGFVGSDCSSPVECDFTSPGDEGPPRSYLRQWVVIPPPLSSPGPQAS (SEQ ID NO:270) |
| S161 | IL22RA1 NM_021258_3 | SYRYVTKPPAPPNSLNVQRVLTFQPLRFIQEHVLIPVFDLSGPSSLAQPVQYSQIRVSGPREPAGAPQRHSLSEITYLGQPDISILQPSNVPPPQILSPLSYAPNAAPEVGPPSYAPQVTPEAQFPFYAPQAISKVQPSSYAPQATPDSWPPSYGVCMEGSGKDSPTGTLSSPKHLRPKGQLQKEPPAGSCMLGGLSLQEVTSLAMEESQEAKSLHQPLGICTDRTSDPNVLHSGEEGTPQYLKGQLPLLSSVQIEGHPMSLPLQPPSRPCSPSDQGPSPWGLLESLVCPKDEAKSPAPETSDLEQPTELDSLFRGLALTVQWES (SEQ ID NO:271) |
| S165 | IL23R NM_144701_2 | NRSFRTGIKRRILLLIPKWLYEDIPNMKNSNVVKMLQENSELMNNNSSEQVLYVDPMITEIKEIFIPEHKPTDYKKENTGPLETRDYPQNSLFDNTTVVYIPDLNTGYKPQISNFLPEGSHLSNNNEITSLTLKPPVDSLDSGNNPRLQKHPNFAFSVSSVNSLSNTIFLGELSLILNQGECSSPDIQNSVEEETTMLLENDSPSETIPEQTLLPDEFVSCLGIVNEELPSINTYFPQNILESHFNRISLLEK (SEQ ID NO:272) |
| S168 | IL27RA NM_004843_3 | TSGRCYHLRHKVLPRWVWEKVPDPANSSSGQPHMEQVPEAQPLGDLPILEVEEMEPPPVMESSQPAQATAPLDSGYEKHFLPTPEELGLLGPPRPQVLA (SEQ ID NO:273) |
| S169 | IL27RA NM_004843_3 | TSWVWEKVPDPANSSSGQPHMEQVPEAQPLGDLPILEVEEMEPPPVMESSQPAQATAPLDSGYEKHFLPTPEELGLLGPPRPQVLA (SEQ ID NO:274) |
| S170 | IL31RA transcript variant 1 NM_139017_5 | KKPNKLTHLCWPTVPNPAESSIATWHGDDFKDKLNLKESDDSVNTEDRILKPCSTPSDKLVIDKLVVNFGNVLQEIFTDEARTGQENNLGGEKNGYVTCPFRPDCPLGKSFEELPVSPEIPPRKSQYLRSRMPEGTRPEAKEQLLFSGQSLVPDHLCEEGAPNPYLKNSVTAREFLVSEKLPEHTKGEV (SEQ ID NO:275) |
| S171 | IL31RA transcript variant 4 NM_001242638_1 | KKPNKLTHLCWPTVPNPAESSIATWHGDDFKDKLNLKESDDSVNTEDRILKPCSTPSDKLVIDKLVVNFGNVLQEIFTDEARTGQENNLGGEKNGTRILSSCPTSI (SEQ ID NO:276) |
| S174 | LEPR transcript variant 1 NM_002303_5 | SHQRMKKLFWEDVPNPKNCSWAQGLNFQKPETFEHLFIKHTASVTCGPLLLEPETISEDISVDTSWKNKDEMMPTTVVSLLSTTDLEKGSVCISDQFNSVNFSEAEGTEVTYEDESQRQPFVKYATLISNSKPSETGEEQGLINSSVTKCFSSKNSPLKDSFSNSSWEIEAQAFFILSDQHPNIISPHLTFSEGLDELLKLEGNFPEENNDKKSIYYLGVTSIKKRESGVLLTDKSRVSCPFPAPCLFTDIRVLQDSCSHFVENNINLGTSSKKTFASYMPQFQTCSTQTHKIMENKMCDLTV (SEQ ID NO:277) |
| S175 | LEPR transcript variant 2 NM_001003680_3 | SHQRMKKLFWEDVPNPKNCSWAQGLNFQKMLEGSMFVKSHHHSLISSTQGHKHCGRPQGPLHRKTRDLCSLVYLLTLPPLLSYDPAKSPSVRNTQE (SEQ ID NO:278) |
| S176 | LEPR transcript variant 3 NM_001003679_3 | SHQRMKKLFWEDVPNPKNCSWAQGLNFQKRTDIL (SEQ ID NO:279) |
| S177 | LEPR transcript variant 5 NM_001198688_1 | SHQRMKKLFWEDVPNPKNCSWAQGLNFQKKMPGTKELLGGGWLT (SEQ ID NO:280) |
| S180 | LIFR NM_001127671_1 | YRKREWIKETFYPDIPNPENCKALQFQKSVCEGSSALKTLEMNPCTPNNVEVLETRSAFPKIEDTEIISPVAERPEDRSDAEPENHVVVSYCPPIIEEEIPNPAADEAGGTAQVIYIDVQSMYQPQAKPEEEQENDPVGGAGYKPQMHLPINSTVEDIAAEEDLDKTAGYRPQANVNTWNLVSPDSPRSIDSNSEIVSFGSPCSINSRQFLIPPKDEDSPKSNGGGWSFTNFFQNKPND (SEQ ID NO:281) |
| S183 | LMP1 NC_007605_1 | YYHGQRHSDEHHHDDSLPHPQQATDDSGHESDSNSNEGRHHLLVSGAGDGPPLCSQNLGAPGGGPDNGPQDPDNTDDNGPQDPDNTDDNGPHDPLPQDPDNTDDNGPQDPDNTDDNGPHDPLPHSPSDSAGNDGGPPQLTEEVENKGGDQGPPLMTDGGGGHSHDSGHGGGDPHLPTLLLGSSGSGGDDDDPHGPVQLSYYD (SEQ ID NO:282) |
| S186 | MPL NM_005373_2 | RWQFPAHYRRLRHALWPSLPDLHRVLGQYLRDTAALSPPKATVYSDTCEEVEPSLLEILPKSSERTPLPLCSSQAQMDYRRLQPSCLGTMPLSVCPPMAESGSCCTTHIANHSYLPLSYWQQP (SEQ ID NO:283) |
| S189 | MYD88 transcript variant 1 NM_001172567_1 | MAAGGPGAGSAAPVSSTSSLPLAALNMRVRRRLSLFLNVRTQVAADWTALAEEMDFEYLEIRQLETQADPTGRLLDAWQGRPGASVGRLLELLTKLGRDDVLLELGPSIEEDCQKYILKQQQEEAEKPLQVAAVDSSVPRTAELAGITTLDDPLGHMPERFDAFICYCPSDIQFVQEMIRQLEQTNYRLKLCVSDRDVLPGTCVWSIASELIEKRLARRPRGGCRRMVVVVSDDYLQSKECDFQTKFALSLSPGAHQKRLIPIKYKAMKKEFPSILRFITVCDYTNPCTKSWFWTRLAKALSLP (SEQ ID NO:284) |
| S190 | MYD88 transcript variant 2 NM_002468_4 | MAAGGPGAGSAAPVSSTSSLPLAALNMRVRRRLSLFLNVRTQVAADWTALAEEMDFEYLEIRQLETQADPTGRLLDAWQGRPGASVGRLLELLTKLGRDDVLLELGPSIEEDCQKYILKQQQEEAEKPLQVAAVDSSVPRTAELAGITTLDDPLGHMPERFDAFICYCPSDIQFVQEMIRQLEQTNYRLKLCVSDRDVLPGTCVWSIASELIEKRCRRMVVVVSDDYLQSKECDFQTKFALSLSPGAHQKRLIPIKYKAMKKEFPSILRFITVCDYTNPCTKSWFWTRLAKALSLP (SEQ ID NO:285) |
| S191 | MYD88 transcript variant 3 NM_001172568_1 | MAAGGPGAGSAAPVSSTSSLPLAALNMRVRRRLSLFLNVRTQVAADWTALAEEMDFEYLEIRQLETQADPTGRLLDAWQGRPGASVGRLLELLTKLGRDDVLLELGPSIGHMPERFDAFICYCPSDIQFVQEMIRQLEQTNYRLKLCVSDRDVLPGTCVWSIASELIEKRCRRMVVVVSDDYLQSKECDFQTKFALSLSPGAHQKRLIPIKYKAMKKEFPSILRFITVCDYTNPCTKSWFWTRLAKALSLP (SEQ ID NO:286) |
| S192 | MYD88 transcript variant 4 NM_001172569_1 | MAAGGPGAGSAAPVSSTSSLPLAALNMRVRRRLSLFLNVRTQVAADWTALAEEMDFEYLEIRQLETQADPTGRLLDAWQGRPGASVGRLLELLTKLGRDDVLLELGPSIEEDCQKYILKQQQEEAEKPLQVAAVDSSVPRTAELAGITTLDDPLGAAGWWWLSLMITCRARNVTSRPNLHSASLQVPIRSD (SEQ ID NO:287) |
| S193 | MYD88 transcript variant 5 NM_001172566_1 | MAAGGPGAGSAAPVSSTSSLPLAALNMRVRRRLSLFLNVRTQVAADWTALAEEMDFEYLEIRQLETQADPTGRLLDAWQGRPGASVGRLLELLTKLGRDDVLLELGPSIGAAGWWWLSLMITCRARNVTSRPNLHSASLQVPIRSD (SEQ ID NO:288) |
| S194 | MYD88 transcript variant 1 NM 001172567 1 | MAAGGPGAGSAAPVSSTSSLPLAALNMRVRRRLSLFLNVRTQVAADWTALAEEMDFEYLEIRQLETQADPTGRLLDAWQGRPGASVGRLLELLTKLGRDDVLLELGPSIEEDCQKYILKQQQEEAEKPLQVAAVDSSVPRTAELAGITTLDDPLGHMPERFDAFICYCPSDI (SEQ ID NO:289) |
| S195 | MYD88 transcript variant 3 NM_001172568_1 | MAAGGPGAGSAAPVSSTSSLPLAALNMRVRRRLSLFLNVRTQVAADWTALAEEMDFEYLEIRQLETQADPTGRLLDAWQGRPGASVGRLLELLTKLGRDDVLLELGPSIGHMPERFDAFICYCPSDI (SEQ ID NO:290) |
| S196 | MYD88 transcript variant 1 NM_001172567_1 | MAAGGPGAGSAAPVSSTSSLPLAALNMRVRRRLSLFLNVRTQVAADWTALAEEMDFEYLEIRQLETQADPTGRLLDAWQGRPGASVGRLLELLTKLGRDDVLLELGPSIEEDCQKYILKQQQEEAEKPLQVAAVDSSVPRTAELAGITTLDDPLGHMPERFDAFICYCPSDIQFVQEMIRQLEQTNYRLKLCVSDRDVLPGTCVWSIASELIEKRLARRPRGGCRRMVVVVSDDYLQSKECDFQTKFALSLSPGAHQKRPIPIKYKAMKKEFPSILRFITVCDYTNPCTKSWFWTRLAKALSLP (SEQ ID NO:291) |
| S197 | MYD88 transcript variant 2 NM_002468_4 | MAAGGPGAGSAAPVSSTSSLPLAALNMRVRRRLSLFLNVRTQVAADWTALAEEMDFEYLEIRQLETQADPTGRLLDAWQGRPGASVGRLLELLTKLGRDDVLLELGPSIEEDCQKYILKQQQEEAEKPLQVAAVDSSVPRTAELAGITTLDDPLGHMPERFDAFICYCPSDIQFVQEMIRQLEQTNYRLKLCVSDRDVLPGTCVWSIASELIEKRCRR |
| | | MVVVVSDDYLQSKECDFQTKFALSLSPGAHQKRPIPIKYKAMKKEFPSILRFITVCDYTNPCTKSWFWTRLAKALSLP (SEQ ID NO:292) |
| S198 | MYD88 transcript variant 3 NM_001172568_1 | MAAGGPGAGSAAPVSSTSSLPLAALNMRVRRRLSLFLNVRTQVAADWTALAEEMDFEYLEIRQLETQADPTGRLLDAWQGRPGASVGRLLELLTKLGRDDVLLELGPSIGHMPERFDAFICYCPSDIQFVQEMIRQLEQTNYRLKLCVSDRDVLPGTCVWSIASELIEKRCRRMVVVVSDDYLQSKECDFQTKFALSLSPGAHQKRPIPIKYKAMKKEFPSILRFITVCDYTNPCTKSWFWTRLAKALSLP (SEQ ID NO:293) |
| S199 | OSMR transcript variant 4 NM_001323505_1 | KSQWIKETCYPDIPDPYKSSILSLIKFKENPHLIIMNVSDCIPDAIEVVSKPEGTKIQFLGTRKSLTETELTKPNYLYLLPTEKNHSGPGPCICFENLTYNQAASDSGSCGHVPVSPKAPSMLGLMTSPENVLKALEKNYMNSLGEIPAGETSLNYVSQLASPMFGDKDSLPTNPVEAPHCSEYKMQMAVSLRLALPPPTENSSLSSITLLDPGEHYC (SEQ ID NO:294) |
| S202 | PRLR transcript variant 1 NM_000949_6 | KGYSMVTCIFPPVPGPKIKGFDAHLLEKGKSEELLSALGCQDFPPTSDYEDLLVEYLEVDDSEDQHLMSVHSKEHPSQGMKPTYLDPDTDSGRGSCDSPSLLSEKCEEPQANPSTFYDPEVIEKPENPETTHTWDPQCISMEGKIPYFHAGGSKCSTWPLPQPSQHNPRSSYHNITDVCELAVGPAGAPATLLNEAGKDALKSSQTIKSREEGKATQQREVESFHSETDQDTPWLLPQEKTPFGSAKPLDYVEIHKVNKDGALSLLPKQRENSGKPKKPGTPENNKEYAKVSGVMDNNILVLVPDPHAKNVACFEESAKEAPPSLEQNQAEKALANFTATSSKCRLQLGGLDYLDPACFTHSFH (SEQ ID NO:295) |
| S211 | TNFRSF4 NM_003327_3 | ALYLLRRDQRLPPDAHKPPGGGSFRTPIQEEQADAHSTLAKI (SEQ ID NO:296) |
| S212 | TNFRSF8 transcript variant 1 NM_001243_4 | HRRACRKRIRQKLHLCYPVQTSQPKLELVDSRPRRSSTQLRSGASVTEPVAEERGLMSQPLMETCHSVGAAYLESLPLQDASPAGGPSSPRDLPEPRVSTEHTNNKIEKIYIMKADTVIVGTVKAELPEGRGLAGPAEPELEEELEADHTPHYPEQETEPPLGSCSDVMLSVEEEGKEDPLPTAASGK (SEQ ID NO:297) |
| S213 | TNFRSF9 NM_001561_5 | KRGRKKLLYIFKQPFMRPVQTTQEEDGCSCRFPEEEEGGCEL (SEQ ID NO:298) |
| S214 | TNFRSF14 transcript variant 1 NM_003820_3 | CVKRRKPRGDVVKVIVSVQRKRQEAEGEATVIEALQAPPDVTTVAVEETIPSFTGRSPNH (SEQ ID NO:299) |
| S215 | TNFRSF18 transcript variant 1 NM_004195_2 | QLGLHIWQLRSQCMWPRETQLLLEVPPSTEDARSCQFPEEERGERSAEEKGRLGDLWV (SEQ ID NO:300) |
| S216 | TNFRSF18 transcript variant 3_NM_148902_1 | QLGLHIWQLRKTQLLLEVPPSTEDARSCQFPEEERGERSAEEKGRLGDLWV (SEQ ID NO:301) |
| X001 | Linker | GSGGSEGGGSEGGAATAGSGSGS (SEQ ID NO:302) |

TABLE 2

Ab1.1 Clones from 4^{th} panning round

| Ab1.1 Clone | Ab1.1 | Control | Ratio | Ab1.1 Clone | Ab1.1 | Control | Ratio |
|---|---|---|---|---|---|---|---|
| 1 | 2.4588 | 0.549 | 4.5 | 46 | 1.9639 | 0.6448 | 3.0 |
| 2 | 1.8091 | 0.4484 | 4.0 | 47 | 1.1639 | 0.7017 | 1.7 |
| 3 | 0.6065 | 0.5751 | 1.1 | 48 | 1.9877 | 0.6818 | 2.9 |
| 4 | 2.2638 | 0.6021 | 3.8 | 49 | 1.1885 | 0.6323 | 1.9 |
| 5 | 0.6107 | 0.6563 | 0.9 | 50 | 1.3607 | 0.6415 | 2.1 |
| 6 | 1.3868 | 0.4654 | 3.0 | 51 | 1.1857 | 0.6656 | 1.8 |
| 7 | 1.7038 | 0.5912 | 2.9 | 52 | 1.4835 | 0.6945 | 2.1 |
| 8 | 1.8222 | 0.5429 | 3.4 | 53 | 1.7942 | 0.6871 | 2.6 |
| 9 | 1.8769 | 0.6839 | 2.7 | 54 | 1.2299 | 0.6208 | 2.0 |
| 10 | 1.4259 | 0.4908 | 2.9 | 55 | 1.9349 | 0.6492 | 3.0 |
| 11 | 1.6424 | 0.5697 | 2.9 | 56 | 1.7907 | 0.6718 | 2.7 |
| 12 | 1.5823 | 0.558 | 2.8 | 57 | 1.0701 | 0.6496 | 1.6 |
| 13 | 0.3612 | 0.5903 | 0.6 | 58 | 1.381 | 0.6183 | 2.2 |
| 14 | 0.9557 | 0.463 | 2.1 | 59 | 1.8883 | 0.6622 | 2.9 |
| 15 | 1.5047 | 0.5233 | 2.9 | 60 | 2.2758 | 0.6511 | 3.5 |
| 16 | 1.0152 | 0.5695 | 1.8 | 61 | 2.2687 | 0.6463 | 3.5 |
| 17 | 0.4691 | 0.6741 | 0.7 | 62 | 1.8997 | 0.6912 | 2.7 |
| 18 | 0.7718 | 0.4646 | 1.7 | 63 | 1.7105 | 0.6386 | 2.7 |
| 19 | 1.7226 | 0.54 | 3.2 | 64 | 1.8005 | 0.655 | 2.7 |
| 20 | 0.6258 | 0.563 | 1.1 | 65 | 2.2723 | 0.6223 | 3.7 |
| 21 | 1.0541 | 0.7099 | 1.5 | 66 | 1.2177 | 0.7047 | 1.7 |
| 22 | 1.7285 | 0.485 | 3.6 | 67 | 1.6295 | 0.7126 | 2.3 |
| 23 | 1.122 | 0.6174 | 1.8 | 68 | 1.5747 | 0.6826 | 2.3 |
| 24 | 1.6164 | 0.5771 | 2.8 | 69 | 1.3397 | 0.6129 | 2.2 |
| 25 | 0.3558 | 0.5334 | 0.7 | 70 | 1.7763 | 0.6535 | 2.7 |
| 26 | 0.2689 | 0.6977 | 0.4 | 71 | 1.7183 | 0.6057 | 2.8 |
| 27 | 0.5302 | 0.9309 | 0.6 | 72 | 1.2671 | 0.6081 | 2.1 |
| 28 | 0.3543 | 0.6183 | 0.6 | 73 | 1.67 | 1.1257 | 1.5 |
| 29 | 0.2265 | 0.5698 | 0.4 | 74 | 1.4253 | 0.6145 | 2.3 |
| 30 | 0.2102 | 0.6212 | 0.3 | 75 | 1.0627 | 0.5645 | 1.9 |
| 31 | 0.2115 | 0.5947 | 0.4 | 76 | 1.5179 | 0.5693 | 2.7 |
| 32 | 0.2662 | 0.6027 | 0.4 | 77 | 1.5533 | 0.5835 | 2.7 |
| 33 | 0.3696 | 0.5669 | 0.7 | 78 | 1.6402 | 0.5382 | 3.0 |
| 34 | 0.2246 | 0.6243 | 0.4 | 79 | 2.0145 | 0.617 | 3.3 |
| 35 | 0.2081 | 0.6078 | 0.3 | 80 | 1.7805 | 0.5014 | 3.6 |
| 36 | 0.2976 | 0.6931 | 0.4 | 81 | 1.6182 | 0.4758 | 3.4 |
| 37 | 0.9743 | 0.5667 | 1.7 | 82 | 1.7224 | 0.4733 | 3.6 |
| 38 | 0.2064 | 0.5734 | 0.4 | 83 | 2.1371 | 0.5561 | 3.8 |
| 39 | 0.195 | 0.5709 | 0.3 | 84 | 1.6939 | 0.5621 | 3.0 |
| 40 | 0.2767 | 0.662 | 0.4 | 85 | 2.196 | 0.5364 | 4.1 |
| 41 | 0.2598 | 0.687 | 0.4 | 86 | 2.3053 | 0.5435 | 4.2 |
| 42 | 0.2445 | 0.6656 | 0.4 | 87 | 1.9764 | 0.5398 | 3.7 |
| 43 | 0.1862 | 0.5817 | 0.3 | 88 | 1.3631 | 0.5188 | 2.6 |
| 44 | 0.2511 | 0.6399 | 0.4 | 89 | 2.0549 | 0.594 | 3.5 |
| 45 | 1.9493 | 0.6184 | 3.2 | | | | |

TABLE 3

Ab1.1 Clones from 5^{th} panning round

| Ab1.1 Clone | Ab1.1 | Control | Ratio | Ab1.1 Clone | Ab1.1 | Control | Ratio |
|---|---|---|---|---|---|---|---|
| 90 | 1.4856 | 0.6047 | 2.5 | 186 | 0.1794 | 0.1382 | 1.3 |
| 91 | 1.6268 | 0.4791 | 3.4 | 187 | 0.4721 | 0.1251 | 3.8 |
| 92 | 1.2074 | 0.48 | 2.5 | 188 | 0.4024 | 0.1096 | 3.7 |
| 93 | 0.8499 | 0.4531 | 1.9 | 189 | 0.1828 | 0.1246 | 1.5 |
| 94 | 1.5283 | 0.4411 | 3.5 | 190 | 0.4845 | 0.1147 | 4.2 |
| 95 | 1.3589 | 0.4972 | 2.7 | 191 | 0.2009 | 0.1469 | 1.4 |
| 96 | 1.835 | 0.4904 | 3.7 | 192 | 0.0724 | 0.1304 | 0.6 |
| 97 | 1.418 | 0.4873 | 2.9 | 193 | 0.5504 | 0.1322 | 4.2 |
| 98 | 1.4241 | 0.4838 | 2.9 | 194 | 0.1747 | 0.1292 | 1.4 |
| 99 | 0.9938 | 0.5013 | 2.0 | 195 | 0.1918 | 0.1267 | 1.5 |
| 100 | 0.7618 | 0.4606 | 1.7 | 196 | 0.4586 | 0.1217 | 3.8 |
| 101 | 1.2826 | 0.4897 | 2.6 | 197 | 0.2008 | 0.1623 | 1.2 |
| 102 | 1.5341 | 0.4894 | 3.1 | 198 | 0.0794 | 0.1042 | 0.8 |
| 103 | 0.8302 | 0.5143 | 1.6 | 199 | 0.1386 | 0.1025 | 1.4 |
| 104 | 0.4899 | 0.463 | 1.1 | 200 | 0.1566 | 0.1095 | 1.4 |
| 105 | 1.164 | 0.4827 | 2.4 | 201 | 0.3392 | 0.1052 | 3.2 |
| 106 | 1.1465 | 0.4609 | 2.5 | 202 | 0.1697 | 0.1128 | 1.5 |
| 107 | 0.5959 | 0.4593 | 1.3 | 203 | 0.2718 | 0.1108 | 2.5 |
| 108 | 1.1027 | 0.6966 | 1.6 | 204 | 0.1032 | 0.1256 | 0.8 |
| 109 | 1.3299 | 0.4855 | 2.7 | 205 | 0.0841 | 0.117 | 0.7 |
| 110 | 0.9404 | 0.4794 | 2.0 | 206 | 0.3912 | 0.105 | 3.7 |
| 111 | 0.8598 | 0.4569 | 1.9 | 207 | 0.3123 | 0.2322 | 1.3 |
| 112 | 0.4028 | 0.4425 | 0.9 | 208 | 0.1386 | 0.1308 | 1.1 |
| 113 | 0.2716 | 0.5142 | 0.5 | 209 | 0.1522 | 0.1431 | 1.1 |
| 114 | 0.1792 | 0.459 | 0.4 | 210 | 0.0707 | 0.0882 | 0.8 |
| 115 | 0.2675 | 0.6797 | 0.4 | 211 | 0.1675 | 0.1278 | 1.3 |
| 116 | 0.164 | 0.4277 | 0.4 | 212 | 0.1705 | 0.1084 | 1.6 |
| 117 | 0.4299 | 0.4452 | 1.0 | 213 | 0.2875 | 0.1062 | 2.7 |
| 118 | 0.267 | 0.458 | 0.6 | 214 | 0.3101 | 0.2086 | 1.5 |
| 119 | 0.2291 | 0.4601 | 0.5 | 215 | 0.3351 | 0.0937 | 3.6 |
| 120 | 0.1834 | 0.4759 | 0.4 | 216 | 0.3888 | 0.0974 | 4.0 |
| 121 | 0.4776 | 0.4246 | 1.1 | 217 | 0.2089 | 0.1025 | 2.0 |
| 122 | 0.6578 | 0.4225 | 1.6 | 218 | 0.11 | 0.0903 | 1.2 |
| 123 | 0.5838 | 0.459 | 1.3 | 219 | 0.1329 | 0.1169 | 1.1 |
| 124 | 0.2812 | 0.4281 | 0.7 | 220 | 0.48 | 0.1173 | 4.1 |
| 125 | 1.0784 | 0.4481 | 2.4 | 221 | 0.3417 | 0.1173 | 2.9 |
| 126 | 0.8106 | 0.5288 | 1.5 | 222 | 0.2496 | 0.0967 | 2.6 |
| 127 | 1.2029 | 0.4201 | 2.9 | 223 | 0.2632 | 0.1089 | 2.4 |
| 128 | 0.2542 | 0.4606 | 0.6 | 224 | 0.2447 | 0.1026 | 2.4 |
| 129 | 1.3 | 0.4595 | 2.8 | 225 | 0.3436 | 0.106 | 3.2 |
| 130 | 0.2083 | 0.4903 | 0.4 | 226 | 0.103 | 0.1223 | 0.8 |
| 131 | 1.4514 | 0.4162 | 3.5 | 227 | 0.3274 | 0.0956 | 3.4 |
| 132 | 0.5408 | 0.4717 | 1.1 | 228 | 0.303 | 0.1011 | 3.0 |
| 133 | 0.4076 | 0.439 | 0.9 | 229 | 0.1799 | 0.0933 | 1.9 |
| 134 | 0.9592 | 0.5445 | 1.8 | 230 | 0.2065 | 0.1067 | 1.9 |
| 135 | 0.9574 | 0.4188 | 2.3 | 231 | 0.0928 | 0.1271 | 0.7 |
| 136 | 0.7604 | 0.4226 | 1.8 | 232 | 0.4444 | 0.1225 | 3.6 |
| 137 | 0.5895 | 0.553 | 1.1 | 233 | 0.0977 | 0.1166 | 0.8 |
| 138 | 0.5465 | 0.4183 | 1.3 | 234 | 0.0973 | 0.1044 | 0.9 |
| 139 | 0.7304 | 0.4267 | 1.7 | 235 | 0.2504 | 0.1073 | 2.3 |
| 140 | 1.0639 | 0.3941 | 2.7 | 236 | 0.2878 | 0.1011 | 2.8 |
| 141 | 1.0286 | 0.3993 | 2.6 | 237 | 0.2485 | 0.1182 | 2.1 |
| 142 | 0.9285 | 0.3881 | 2.4 | 238 | 0.246 | 0.1109 | 2.2 |
| 143 | 1.0762 | 0.4204 | 2.6 | 239 | 0.2908 | 0.0907 | 3.2 |
| 144 | 0.1564 | 0.5332 | 0.3 | 240 | 0.305 | 0.0941 | 3.2 |
| 145 | 0.7024 | 0.4304 | 1.6 | 241 | 0.2545 | 0.108 | 2.4 |
| 146 | 0.8023 | 0.4583 | 1.8 | 242 | 0.298 | 0.1021 | 2.9 |
| 147 | 0.4551 | 0.4441 | 1.0 | 243 | 0.2792 | 0.1068 | 2.6 |
| 148 | 0.7863 | 0.4292 | 1.8 | 244 | 0.3429 | 0.1016 | 3.4 |
| 149 | 1.0984 | 0.3936 | 2.8 | 245 | 0.0685 | 0.1127 | 0.6 |
| 150 | 0.766 | 0.5142 | 1.5 | 246 | 0.5484 | 0.1027 | 5.3 |
| 151 | 0.8354 | 0.4366 | 1.9 | 247 | 0.4127 | 0.1294 | 3.2 |
| 152 | 0.8318 | 0.4614 | 1.8 | 248 | 0.2673 | 0.1067 | 2.5 |
| 153 | 0.8058 | 0.4345 | 1.9 | 249 | 0.2814 | 0.1099 | 2.6 |
| 154 | 0.9087 | 0.4574 | 2.0 | 250 | 0.0591 | 0.1379 | 0.4 |
| 155 | 1.6017 | 0.4168 | 3.8 | 251 | 0.117 | 0.0998 | 1.2 |
| 156 | 0.7758 | 0.5313 | 1.5 | 252 | 0.191 | 0.102 | 1.9 |
| 157 | 0.1333 | 0.4229 | 0.3 | 253 | 0.129 | 0.102 | 1.3 |
| 158 | 0.1407 | 0.451 | 0.3 | 254 | 0.2497 | 0.1007 | 2.5 |
| 159 | 0.6762 | 0.4166 | 1.6 | 255 | 0.4235 | 0.1347 | 3.1 |
| 160 | 0.1419 | 0.454 | 0.3 | 256 | 0.3783 | 0.116 | 3.3 |
| 161 | 1.4207 | 0.4471 | 3.2 | 257 | 0.315 | 0.1254 | 2.5 |
| 162 | 0.1497 | 0.538 | 0.3 | 258 | 0.0876 | 0.1188 | 0.7 |
| 163 | 0.1454 | 0.4756 | 0.3 | 259 | 0.34 | 0.1468 | 2.3 |
| 164 | 0.1473 | 0.4649 | 0.3 | 260 | 0.4264 | 0.1123 | 3.8 |
| 165 | 0.1514 | 0.4377 | 0.3 | 261 | 0.1613 | 0.1222 | 1.3 |
| 166 | 0.2845 | 0.4471 | 0.6 | 262 | 0.1196 | 0.0655 | 1.8 |
| 167 | 0.2171 | 0.4344 | 0.5 | 263 | 0.145 | 0.1012 | 1.4 |
| 168 | 0.5434 | 0.5374 | 1.0 | 264 | 0.1993 | 0.1084 | 1.8 |
| 169 | 0.9217 | 0.4211 | 2.2 | 265 | 0.4167 | 0.0935 | 4.5 |
| 170 | 0.1453 | 0.435 | 0.3 | 266 | 0.3363 | 0.1434 | 2.3 |
| 171 | 0.1758 | 0.4331 | 0.4 | 267 | 0.3431 | 0.1139 | 3.0 |
| 172 | 0.3842 | 0.4169 | 0.9 | 268 | 0.2854 | 0.1208 | 2.4 |
| 173 | 0.36 | 0.4249 | 0.8 | 269 | 0.5569 | 0.1151 | 4.8 |
| 174 | 0.9269 | 0.4152 | 2.2 | 270 | 0.6375 | 0.1486 | 4.3 |
| 175 | 0.155 | 0.4168 | 0.4 | 271 | 0.2458 | 0.1352 | 1.8 |
| 176 | 0.7722 | 0.4361 | 1.8 | 272 | 0.2989 | 0.1283 | 2.3 |
| 177 | 0.2203 | 0.3929 | 0.6 | 273 | 0.4145 | 0.1386 | 3.0 |
| 178 | 0.8812 | 0.3958 | 2.2 | 274 | 0.5047 | 0.1433 | 3.5 |
| 179 | 0.7869 | 0.4463 | 1.8 | 275 | 0.3222 | 0.1301 | 2.5 |
| 180 | 1.0636 | 0.426 | 2.5 | 276 | 0.5643 | 0.1792 | 3.1 |
| 181 | 0.1641 | 0.4658 | 0.4 | 277 | 0.4805 | 0.1289 | 3.7 |
| 182 | 0.5162 | 0.4344 | 1.2 | 278 | 0.4756 | 0.1232 | 3.9 |
| 183 | 0.5199 | 0.4504 | 1.2 | 279 | 0.2675 | 0.1237 | 2.2 |
| 184 | 0.6984 | 0.4511 | 1.5 | 280 | 0.4527 | 0.1278 | 3.5 |
| 185 | 0.998 | 0.5748 | 1.7 | 281 | 0.6807 | 0.1608 | 4.2 |

TABLE 4

Ab1.2 Clones from 2^{nd} panning round

| Ab1.2 Clone | Ab1.2 | Control | Ratio | Ab1.2 Clone | Ab1.2 | Control | Ratio |
|---|---|---|---|---|---|---|---|
| 1 | 0.79 | 0.30 | 2.6 | 16 | 1.08 | 0.12 | 9.1 |
| 2 | 1.00 | 0.14 | 7.0 | 17 | 1.20 | 0.31 | 3.8 |
| 3 | 1.14 | 0.31 | 3.7 | 18 | 0.97 | 0.11 | 9.1 |
| 4 | 1.07 | 0.47 | 2.3 | 19 | 1.08 | 0.08 | 13.6 |
| 5 | 1.05 | 0.10 | 10.2 | 20 | 0.87 | 0.08 | 10.6 |
| 6 | 1.12 | 0.14 | 8.2 | 21 | 0.71 | 0.07 | 9.9 |
| 7 | 0.85 | 0.11 | 7.6 | 22 | 0.79 | 0.06 | 12.3 |
| 8 | 0.80 | 0.18 | 4.5 | 23 | 0.75 | 0.36 | 2.1 |
| 9 | 0.87 | 0.09 | 9.5 | 24 | 0.34 | 0.06 | 5.6 |
| 10 | 0.20 | 0.05 | 3.9 | 25 | 1.23 | 0.67 | 1.8 |
| 11 | 1.03 | 0.05 | 18.9 | 26 | 1.23 | 0.61 | 2.0 |
| 12 | 1.34 | 0.21 | 6.2 | 27 | 1.06 | 0.36 | 2.9 |
| 13 | 0.15 | 0.10 | 1.5 | 28 | 0.73 | 0.24 | 3.0 |
| 14 | 1.09 | 0.09 | 12.0 | 29 | 1.17 | 0.12 | 9.5 |
| 15 | 0.90 | 0.07 | 12.5 | 30 | 0.72 | 0.16 | 4.6 |

TABLE 5

Ab1.2 Clones from 3^{rd} panning round

| Ab1.2 Clone | Ab1.2 | Control | Ratio | Ab1.2 Clone | Ab1.2 | Control | Ratio |
|---|---|---|---|---|---|---|---|
| 31 | 0.73 | 0.15 | 5.0 | 64 | 1.11 | 0.10 | 11.3 |
| 32 | 0.91 | 0.11 | 8.6 | 65 | 0.59 | 0.09 | 6.8 |
| 33 | 1.05 | 0.17 | 6.3 | 66 | 0.64 | 0.05 | 12.3 |
| 34 | 0.84 | 0.32 | 2.7 | 67 | 0.71 | 0.12 | 5.8 |
| 35 | 1.01 | 0.18 | 5.8 | 68 | 1.15 | 0.06 | 17.6 |
| 36 | 0.40 | 0.11 | 3.8 | 69 | 1.01 | 0.09 | 11.5 |
| 37 | 1.07 | 0.12 | 8.6 | 70 | 1.01 | 0.06 | 15.9 |
| 38 | 1.07 | 0.08 | 12.7 | 71 | 1.08 | 0.06 | 18.0 |
| 39 | 0.75 | 0.13 | 5.9 | 72 | 0.54 | 0.08 | 6.5 |
| 40 | 1.08 | 0.08 | 13.1 | 73 | 0.87 | 0.09 | 9.5 |
| 41 | 1.01 | 0.07 | 13.7 | 74 | 1.11 | 0.14 | 8.1 |
| 42 | 0.71 | 0.11 | 6.7 | 75 | 1.16 | 0.32 | 3.6 |
| 43 | 1.09 | 0.09 | 12.0 | 76 | 0.40 | 0.26 | 1.5 |
| 44 | 0.79 | 0.11 | 6.9 | 77 | 1.06 | 0.10 | 10.6 |
| 45 | 1.10 | 0.46 | 2.4 | 78 | 0.78 | 0.06 | 12.6 |
| 46 | 1.00 | 0.28 | 3.5 | 79 | 1.05 | 0.89 | 1.2 |
| 47 | 0.71 | 0.21 | 3.4 | 80 | 0.62 | 0.05 | 13.0 |
| 48 | 1.08 | 0.32 | 3.3 | 81 | 0.87 | 0.16 | 5.5 |
| 49 | 1.18 | 0.31 | 3.8 | 82 | 0.53 | 0.42 | 1.3 |
| 50 | 0.69 | 0.41 | 1.7 | 83 | 0.77 | 0.10 | 7.8 |
| 51 | 0.75 | 0.71 | 1.1 | 84 | 1.10 | 0.07 | 16.7 |
| 52 | 0.84 | 0.41 | 2.1 | 85 | 0.90 | 0.07 | 12.3 |
| 53 | 1.06 | 0.09 | 11.6 | 86 | 1.07 | 0.06 | 18.2 |
| 54 | 1.11 | 0.24 | 4.5 | 87 | 1.11 | 0.10 | 11.7 |
| 55 | 0.72 | 0.20 | 3.6 | 88 | 1.08 | 0.08 | 14.4 |
| 56 | 0.80 | 0.26 | 3.1 | 89 | 1.18 | 0.21 | 5.6 |
| 57 | 1.10 | 0.19 | 5.7 | 90 | 1.11 | 0.07 | 16.6 |
| 58 | 0.36 | 0.36 | 1.0 | 91 | 1.11 | 0.09 | 12.5 |
| 59 | 1.13 | 0.63 | 1.8 | 92 | 1.13 | 0.51 | 2.2 |
| 60 | 0.18 | 0.05 | 3.7 | 93 | 1.03 | 0.20 | 5.2 |
| 61 | 0.55 | 0.06 | 8.9 | 94 | 0.98 | 0.08 | 12.1 |
| 62 | 0.43 | 0.12 | 3.5 | 95 | 0.58 | 0.07 | 8.7 |
| 63 | 1.05 | 0.09 | 12.1 | | | | |

The application's sequence listing, which the Patent Office published only in electronic form, follows.

SEQUENCE LISTING (698 sequences)

SEQ ID NO: 1 - protein, 3 aa, Homo sapiens
  misc_feature (1)..(3): integrin-binding peptide segment
RGD

SEQ ID NO: 2 - protein, 43 aa, Homo sapiens
  misc_feature (1)..(43): wild-type CD8 Stalk
TTTPAPRPPTPAPTIASQPLSLRPEACRPAAGGAVHTRGLDFA

SEQ ID NO: 3 - protein, 42 aa, Homo sapiens
  misc_feature (1)..(42): wild-type CD28 Stalk
FCKIEVMYPPPYLDNEKSNGTIIHVKGKHLCPSPLFPGPSKP

SEQ ID NO: 4 - protein, 4 aa, Artificial Sequence
  Synthetic: Hinge
CPPC

SEQ ID NO: 5 - protein, 5 aa, Artificial Sequence
  Synthetic: Hinge
DKTHT

SEQ ID NO: 6 - protein, 15 aa, Artificial Sequence
  Synthetic: Hinge
CPEPKSCDTPPPCPR

SEQ ID NO: 7 - protein, 12 aa, Artificial Sequence
  Synthetic: Hinge
ELKTPLGDTTHT

SEQ ID NO: 8 - protein, 10 aa, Artificial Sequence
  Synthetic: Hinge
KSCDKTHTCP

SEQ ID NO: 9 - protein, 7 aa, Artificial Sequence
  Synthetic: Hinge
KCCVDCP

SEQ ID NO: 10 - protein, 7 aa, Artificial Sequence
  Synthetic: Hinge
KYGPPCP

SEQ ID NO: 11 - protein, 15 aa, Artificial Sequence
  Synthetic: Hinge
EPKSCDKTHTCPPCP

SEQ ID NO: 12 - protein, 12 aa, Artificial Sequence
  Synthetic: Hinge
ERKCCVECPPCP

SEQ ID NO: 13 - protein, 17 aa, Artificial Sequence
  Synthetic: Hinge
ELKTPLGDTTHTCPRCP

SEQ ID NO: 14 - protein, 12 aa, Artificial Sequence
  Synthetic: Hinge
SPNMVPHAHHAQ

SEQ ID NO: 15 - protein, 15 aa, Artificial Sequence
  Synthetic: Hinge
EPKSCDKTYTCPPCP

SEQ ID NO: 16 - protein, 45 aa, Artificial Sequence
  Synthetic: Hinge
TTTPAPRPPTPAPTIASQPLSLRPEACRPAAGGAVHTRGLDFACD

SEQ ID NO: 17 - protein, 24 aa, Homo sapiens
  misc_feature (1)..(24): CD* alpha Transmembrane domain
IYIWAPLAGTCGVLLLSLVITLYC

SEQ ID NO: 18 - protein, 23 aa, Homo sapiens
  misc_feature (1)..(23): CD8 beta Transmembrane domain
LGLLVAGVLVLLVSLGVAIHLCC

SEQ ID NO: 19 - protein, 25 aa, Homo sapiens
  misc_feature (1)..(25): CD4 Transmembrane domain
ALIVLGGVAGLLLFIGLGIFFCVRC

SEQ ID NO: 20 - protein, 23 aa, Homo sapiens
  misc_feature (1)..(23): CD3 zeta Transmembrane domain
LCYLLDGILFIYGVILTALFLRV

SEQ ID NO: 21 - protein, 27 aa, Homo sapiens
  misc_feature (1)..(27): CD28 Transmembrane domain
FWVLVVVGGVLACYSLLVTVAFIIFWV

SEQ ID NO: 22 - protein, 26 aa, Homo sapiens
  misc_feature (1)..(26): OX40 Transmembrane domain
VAAILGLGLVLGLLGPLAILLALYLL

SEQ ID NO: 23 - protein, 24 aa, Homo sapiens
  misc_feature (1)..(24): CD7 Transmembrane domain
ALPAALAVISFLLGLGLGVACVLA

SEQ ID NO: 24 - protein, 69 aa, Homo sapiens
  misc_feature (1)..(69): CD8a Stalk and Transmembrane domain
TTTPAPRPPTPAPTIASQPLSLRPEACRPAAGGAVHTRGLDFACDIYIWAPLAGTCGVLLLSLVITLYC

SEQ ID NO: 25 - protein, 66 aa, Homo sapiens
  misc_feature (1)..(66): CD28 Stalk and Transmembrane domain
IEVMYPPPYLDNEKSNGTIIHVKGKHLCPSPLFPGPSKPFWVLVVVGGVLACYSLLVTVAFIIFWV

SEQ ID NO: 26 - protein, 163 aa, Homo sapiens
  misc_feature (1)..(163): CD3Z Activating domain isoform 1
MKWKALFTAAILQAQLPITEAQSFGLLDPKLCYLLDGILFIYGVILTALFLRVKFSRSADAPAYQQGQNQLYNELNLGRREEYDVLDKRRGRDPEMGGKPRRKNPQEGLYNELQKDKMAEAYSEIGMKGERRRGKGHDGLYQGLSTATKDTYDALHMQALPPR

SEQ ID NO: 27 - protein, 164 aa, Homo sapiens
  misc_feature (1)..(164): CD3Z Activating domain isoform 2
MKWKALFTAAILQAQLPITEAQSFGLLDPKLCYLLDGILFIYGVILTALFLRVKFSRSADAPAYQQGQNQLYNELNLGRREEYDVLDKRRGRDPEMGGKPQRRKNPQEGLYNELQKDKMAEAYSEIGMKGERRRGKGHDGLYQGLSTATKDTYDALHMQALPPR

SEQ ID NO: 28 - protein, 112 aa, Homo sapiens
  misc_feature (1)..(112): CD3Z Activating domain isoform 3
RVKFSRSADAPAYQQGQNQLYNELNLGRREEYDVLDKRRGRDPEMGGKPRRKNPQEGLYNELQKDKMAEAYSEIGMKGERRRGKGHDGLYQGLSTATKDTYDALHMQALPPR

SEQ ID NO: 29 - protein, 113 aa, Homo sapiens
  misc_feature (1)..(113): CD3Z Activating domain isoform
RVKFSRSADAPAYQQGQNQLYNELNLGRREEYDVLDKRRGRDPEMGGKPQRRKNPQEGLYNELQKDKMAEAYSEIGMKGERRRGKGHDGLYQGLSTATKDTYDALHMQALPPR

SEQ ID NO: 30 - protein, 21 aa, Homo sapiens
  misc_feature (1)..(21): CD3Z Activating domain isoform 4
NQLYNELNLGRREEYDVLDKR

SEQ ID NO: 31 - protein, 22 aa, Homo sapiens
  misc_feature (1)..(22): CD3Z Activating domain isoform 5
EGLYNELQKDKMAEAYSEIGMK

SEQ ID NO: 32 - protein, 21 aa, Homo sapiens
  misc_feature (1)..(21): CD3Z Activating domain isoform 6
DGLYQGLSTATKDTYDALHMQ

SEQ ID NO: 33 - protein, 171 aa, Homo sapiens
  misc_feature (1)..(171): CD3D Activating domain isoform 1
MEHSTFLSGLVLATLLSQVSPFKIPIEELEDRVFVNCNTSITWVEGTVGTLLSDITRLDLGKRILDPRGIYRCNGTDIYKDKESTVQVHYRMCQSCVELDPATVAGIIVTDVIATLLLALGVFCFAGHETGRLSGAADTQALLRNDQVYQPLRDRDDAQYSHLGGNWARNK

SEQ ID NO: 34 - protein, 127 aa, Homo sapiens
  misc_feature (1)..(127): CD3D Activating domain isoform 2
MEHSTFLSGLVLATLLSQVSPFKIPIEELEDRVFVNCNTSITWVEGTVGTLLSDITRLDLGKRILDPRGIYRCNGTDIYKDKESTVQVHYRTADTQALLRNDQVYQPLRDRDDAQYSHLGGNWARNK

SEQ ID NO: 35 - protein, 21 aa, Homo sapiens
  misc_feature (1)..(21): CD3D Activating domain isoform 3
DQVYQPLRDRDDAQYSHLGGN

SEQ ID NO: 36 - protein, 206 aa, Homo sapiens
  misc_feature (1)..(206): CD3E Activating domain isoform 1
MQSGTHWRVLGLCLLSVGVWGQDGNEEMGGITQTPYKVSISGTTVILTCPQYPGSEILWQHNDKNIGGDEDDKNIGSDEDHLSLKEFSELEQSGYYVCYPRGSKPEDANFYLYLRARVCENCMEMDMSVATIVIVDICITGGLLLLVYYWSKNRKAKAKPVTRGAGAGGRQRGQNKERPPPVPNPDYEPIRKGQRDLYSGLNQRRI

SEQ ID NO: 37 - protein, 21 aa, Homo sapiens
  misc_feature (1)..(21): CD3E Activating domain isoform 2
NPDYEPIRKGQRDLYSGLNQR

SEQ ID NO: 38 - protein, 182 aa, Homo sapiens
  misc_feature (1)..(182): CD3G Activating domain isoform 1
MEQGKGLAVLILAIILLQGTLAQSIKGNHLVKVYDYQEDGSVLLTCDAEAKNITWFKDGKMIGFLTEDKKKWNLGSNAKDPRGMYQCKGSQNKSKPLQVYYRMCQNCIELNAATISGFLFAEIVSIFVLAVGVYFIAGQDGVRQSRASDKQTLLPNDQLYQPLKDREDDQYSHLQGNQLRRN

SEQ ID NO: 39 - protein, 21 aa, Homo sapiens
  misc_feature (1)..(21): CD3G Activating domain isoform 2
DQLYQPLKDREDDQYSHLQGN

SEQ ID NO: 40 - protein, 226 aa, Homo sapiens
  misc_feature (1)..(226): CD79A Activating domain isoform 1
MPGGPGVLQALPATIFLLFLLSAVYLGPGCQALWMHKVPASLMVSLGEDAHFQCPHNSSNNANVTWWRVLHGNYTWPPEFLGPGEDPNGTLIIQNVNKSHGGIYVCRVQEGNESYQQSCGTYLRVRQPPPRPFLDMGEGTKNRIITAEGIILLFCAVVPGTLLLFRKRWQNEKLGLDAGDEYEDENLYEGLNLDDCSMYEDISRGLQGTYQDVGSLNIGDVQLEKP

SEQ ID NO: 41 - protein, 188 aa, Homo sapiens
  misc_feature (1)..(188): CD79A Activating domain isoform 2
MPGGPGVLQALPATIFLLFLLSAVYLGPGCQALWMHKVPASLMVSLGEDAHFQCPHNSSNNANVTWWRVLHGNYTWPPEFLGPGEDPNEPPPRPFLDMGEGTKNRIITAEGIILLFCAVVPGTLLLFRKRWQNEKLGLDAGDEYEDENLYEGLNLDDCSMYEDISRGLQGTYQDVGSLNIGDVQLEKP

SEQ ID NO: 42 - protein, 21 aa, Homo sapiens
  misc_feature (1)..(21): CD79A Activating domain isoform 3
ENLYEGLNLDDCSMYEDISRG

SEQ ID NO: 43 - protein, 113 aa, Homo sapiens
  misc_feature (1)..(113): DAP12 Activating domain isoform 1
MGGLEPCSRLLLLPLLLAVSGLRPVQAQAQSDCSCSTVSPGVLAGIVMGDLVLTVLIALAVYFLGRLVPRGRGAAEAATRKQRITETESPYQELQGQRSDVYSDLNTQRPYYK

SEQ ID NO: 44 - protein, 107 aa, Homo sapiens
  misc_feature (1)..(107): DAP12 Activating domain isoform 2
MGGLEPCSRLLLLPLLLAVSGLRPVQAQAQSDCSCSTVSPGVLAGIVMGDLVLTVLIALAVYFLGRLVPRGRGAAEATRKQRITETESPYQELQGQRSDVYSDLNTQ

SEQ ID NO: 45 - protein, 102 aa, Homo sapiens
  misc_feature (1)..(102): DAP12 Activating domain isoform 3
MGGLEPCSRLLLLPLLLAVSDCSCSTVSPGVLAGIVMGDLVLTVLIALAVYFLGRLVPRGRGAAEAATRKQRITETESPYQELQGQRSDVYSDLNTQRPYYK

SEQ ID NO: 46 - protein, 101 aa, Homo sapiens
  misc_feature (1)..(101): DAP12 Activating domain isoform 4
MGGLEPCSRLLLLPLLLAVSDCSCSTVSPGVLAGIVMGDLVLTVLIALAVYFLGRLVPRGRGAAEATRKQRITETESPYQELQGQRSDVYSDLNTQRPYYK

SEQ ID NO: 47 - protein, 21 aa, Homo sapiens
  misc_feature (1)..(21): DAP12 Activating domain isoform 5
ESPYQELQGQRSDVYSDLNTQ

SEQ ID NO: 48 - protein, 86 aa, Homo sapiens
  misc_feature (1)..(86): FCERlG Activating domain isoform 1
MIPAVVLLLLLLVEQAAALGEPQLCYILDAILFLYGIVLTLLYCRLKIQVRKAAITSYEKSDGVYTGLSTRNQETYETLKHEKPPQ

SEQ ID NO: 49 - protein, 21 aa, Homo sapiens
  misc_feature (1)..(21): FCERlG Activating domain isoform 2
DGVYTGLSTRNQETYETLKHE

SEQ ID NO: 50 - protein, 20 aa, Homo sapiens
  misc_feature (1)..(20): DAP10 Activating domain
RPRRSPAQDGKVYINMPGRG

SEQ ID NO: 51 - protein, 68 aa, Homo sapiens
  misc_feature (1)..(68): CD28 Activating domain
FWVLVVVGGVLACYSLLVTVAFIIFWVRSKRSRLLHSDYMNMTPRRPGPTRKHYQPYAPPRDFAAYRS

SEQ ID NO: 52 - protein, 619 aa, Homo sapiens
  misc_feature (1)..(619): ZAP70 Activating domain
MPDPAAHLPFFYGSISRAEAEEHLKLAGMADGLFLLRQCLRSLGGYVLSLVHDVRFHHFPIERQLNGTYAIAGGKAHCGPAELCEFYSRDPDGLPCNLRKPCNRPSGLEPQPGVFDCLRDAMVRDYVRQTWKLEGEALEQAIISQAPQVEKLIATTAHERMPWYHSSLTREEAERKLYSGAQTDGKFLLRPRKEQGTYALSLIYGKTVYHYLISQDKAGKYCIPEGTKFDTLWQLVEYLKLKADGLIYCLKEACPNSSASNASGAAAPTLPAHPSTLTHPQRRIDTLNSDGYTPEPARITSPDKPRPMPMDTSVYESPYSDPEELKDKKLFLKRDNLLIADIELGCGNFGSVRQGVYRMRKKQIDVAIKVLKQGTEKADTEEMMREAQIMHQLDNPYIVRLIGVCQAEALMLVMEMAGGGPLHKFLVGKREEIPVSNVAELLHQVSMGMKYLEEKNFVHRDLAARNVLLVNRHYAKISDFGLSKALGADDSYYTARSAGKWPLKWYAPECINFRKFSSRSDVWSYGVTMWEALSYGQKPYKKMKGPEVMAFIEQGKRMECPPECPPELYALMSDCWIYKWEDRPDFLTVEQRMRACYYSLASKVEGPPGSTQKAEAACA

SEQ ID NO: 53 - protein, 42 aa, Homo sapiens
  misc_feature (1)..(42): CD137 Co-stimulatory domain
KRGRKKLLYIFKQPFMRPVQTTQEEDGCSCRFPEEEEGGCEL

SEQ ID NO: 54 - protein, 41 aa, Homo sapiens
  misc_feature (1)..(41): CD28 Co-stimulatory domain
RSKRSRLLHSDYMNMTPRRPGPTRKHYQPYAPPRDFAAYRS

SEQ ID NO: 55 - protein, 41 aa, Homo sapiens
  misc_feature (1)..(41): IC Co-stimulatory domain
RSKRSRLLHSDYMNMTPRRPGPTRKHYQAYAAARDFAAYRS

SEQ ID NO: 56 - protein, 35 aa, Homo sapiens
  misc_feature (1)..(35): ICOS Co-stimulatory domain
TKKKYSSSVHDPNGEYMFMRAVNTAKKSRLTDVTL

SEQ ID NO: 57 - protein, 37 aa, Homo sapiens
  misc_feature (1)..(37): OX40 Co-stimulatory domain
RRDQRLPPDAHKPPGGGSFRTPIQEEQADAHSTLAKI

SEQ ID NO: 58 - protein, 49 aa, Homo sapiens
  misc_feature (1)..(49): CD27 Co-stimulatory domain
HQRRKYRSNKGESPVEPAEPCRYSCPREEEGSTIPIQEDYRKPEPACSP

SEQ ID NO: 59 - protein, 114 aa, Homo sapiens
  misc_feature (1)..(114): BLTA Co-stimulatory domain
CCLRRHQGKQNELSDTAGREINLVDAHLKSEQTEASTRQNSQVLLSETGIYDNDPDLCFRMQEGSEVYSNPCLEENKPGIVYASLNHSVIGPNSRLARNVKEAPTEYASICVRS

SEQ ID NO: 60 - protein, 187 aa, Homo sapiens
  misc_feature (1)..(187): CD30 Co-stimulatory domain
RRACRKRIRQKLHLCYPVQTSQPKLELVDSRPRRSSTQLRSGASVTEPVAEERGLMSQPLMETCHSVGAAYLESLPLQDASPAGGPSSPRDLPEPRVSTEHTNNKIEKIYIMKADTVIVGTVKAELPEGRGLAGPAEPELEEELEADHTPHYPEQETEPPLGSCSDVMLSVEEEGKEDPLPTAASGK

SEQ ID NO: 61 - protein, 54 aa, Homo sapiens
  misc_feature (1)..(54): GITR Co-stimulatory domain
HIWQLRSQCMWPRETQLLLEVPPSTEDARSCQFPEEERGERSAEEKGRLGDLWV

SEQ ID NO: 62 - protein, 60 aa, Homo sapiens
  misc_feature (1)..(60): HVEM Co-stimulatory domain
CVKRRKPRGDVVKVIVSVQRKRQEAEGEATVIEALQAPPDVTTVAVEETIPSFTGRSPNH

SEQ ID NO: 63 - protein, 15 aa, Artificial Sequence
  Synthetic: Linker
GGGGSGGGGSGGGGS

SEQ ID NO: 64 - protein, 30 aa, Artificial Sequence
  Synthetic: Linker
GGGGSGGGGSGGGGSGGGGSGGGGSGGGGS

SEQ ID NO: 65 - protein, 14 aa, Artificial Sequence
  Synthetic: Linker
GGGGSGGGSGGGGS

SEQ ID NO: 66 - protein, 4 aa, Artificial Sequence
  Synthetic: Linker
GGSG

SEQ ID NO: 67 - protein, 5 aa, Artificial Sequence
  Synthetic: Linker
GGSGG

SEQ ID NO: 68 - protein, 5 aa, Artificial Sequence
  Synthetic: Linker
GSGSG

SEQ ID NO: 69 - protein, 5 aa, Artificial Sequence
  Synthetic: Linker
GSGGG

SEQ ID NO: 70 - protein, 5 aa, Artificial Sequence
  Synthetic: Linker
GGGSG

SEQ ID NO: 71 - protein, 5 aa, Artificial Sequence
  Synthetic: Linker
GSSSG

SEQ ID NO: 72 - protein, 21 aa, Homo sapiens
  misc_feature (1)..(21): CD8 Signal peptide
MALPVTALLLPLALLLHAARP

SEQ ID NO: 73 - protein, 9 aa, Artificial Sequence
  Synthetic: HA Epitope
YPYDVPDYA

SEQ ID NO: 74 - protein, 8 aa, Artificial Sequence
  Synthetic: FLAG epitope
DYKDDDDK

SEQ ID NO: 75 - protein, 10 aa, Artificial Sequence
  Synthetic: c-myc Epitope
EQKLISEEDL

SEQ ID NO: 76 - protein, 5 aa, Artificial Sequence
  Synthetic: His5 Affinity
HHHHH

SEQ ID NO: 77 - protein, 6 aa, Artificial Sequence
  Synthetic: HisX6 Affinity
HHHHHH

SEQ ID NO: 78 - protein, 8 aa, Artificial Sequence
  Synthetic: Strep Tag Affinity
WSHPQFEK

SEQ ID NO: 79 - protein, 5 aa, Artificial Sequence
  Synthetic: Affinity tag
RYIRS

SEQ ID NO: 80 - protein, 4 aa, Artificial Sequence
  Synthetic: Affinity tag
FHHT

SEQ ID NO: 81 - protein, 17 aa, Artificial Sequence
  Synthetic: Affinity tag
WEAAAREACCRECCARA

SEQ ID NO: 82 - protein, 357 aa, Homo sapiens
  misc_feature (1)..(357): EGFR Truncation
MLLLVTSLLLCELPHPAFLLIPRKVCNGIGIGEFKDSLSINATNIKHFKNCTSISGDLHILPVAFRGDSFTHTPPLDPQELDILKTVKEITGFLLIQAWPENRTDLHAFENLEIIRGRTKQHGQFSLAVVSLNITSLGLRSLKEISDGDVIISGNKNLCYANTINWKKLFGTSGQKTKIISNRGENSCKATGQVCHALCSPEGCWGPEPRDCVSCRNVSRGRECVDKCNLLEGEPREFVENSECIQCHPECLPQAMNITCTGRGPDNCIQCAHYIDGPHCVKTCPAGVMGENNTLVWKYADAGHVCHLCHPNCTYGCTGPGLEGCPTNGPKIPSIATGMVGALLLLLVVALGIGLFM

SEQ ID NO: 83 - protein, 21 aa, Artificial Sequence
  Synthetic: Cleavage signal
GSGEGRGSLLTCGDVEENPGP

SEQ ID NO: 84 - protein, 368 aa, Artificial Sequence
  Synthetic: eTAG IL7RA Ins PPCL (interleukin 7 receptor)
MLLLVTSLLLCELPHPAFLLIPRKVCNGIGIGEFKDSLSINATNIKHFKNCTSISGDLHILPVAFRGDSFTHTPPLDPQELDILKTVKEITGFLLIQAWPENRTDLHAFENLEIIRGRTKQHGQFSLAVVSLNITSLGLRSLKEISDGDVIISGNKNLCYANTINWKKLFGTSGQKTKIISNRGENSCKATGQVCHALCSPEGCWGPEPRDCVSCRNVSRGRECVDKCNLLEGEPREFVENSECIQCHPECLPQAMNITCTGRGPDNCIQCAHYIDGPHCVKTCPAGVMGENNTLVWKYADAGHVCHLCHPNCTYGCTGPGLEGCPTNGPEINNSSGEMDPILLPPCLTISILSFFSVALLVILACVL

SEQ ID NO: 85 - protein, 232 aa, Artificial Sequence
  Synthetic: eTAG IL7RA Ins PPCL (interleukin 7 receptor)
MLLLVTSLLLCELPHPAFLLIPRKVCNGIGIGEFKDSLSINATNIKHFKNCTSISGDLHILPVAFRGDSFTHTPPLDPQELDILKTVKEITGFLLIQAWPENRTDLHAFENLEIIRGRTKQHGQFSLAVVSLNITSLGLRSLKEISDGDVIISGNKNLCYANTINWKKLFGTSGQKTKIISNRGENSCKATGQPEINNSSGEMDPILLPPCLTISILSFFSVALLVILACVL

SEQ ID NO: 86 - protein, 194 aa, Artificial Sequence
  Synthetic: Myc Tag LMP1 NC_007605_1
MEQKLISEEDLEHDLERGPPGPRRPPRGPPLSSSLGLALLLLLLALLFWLYIVMSDWTGGALLVLYSFALMLIIIILIIFIFRRDLLCPLGALCILLLMITLLLIALWNLHGQALFLGIVLFIFGCLLVLGIWIYLLEMLWRLGATIWQLLAFFLAFFLDLILLIIALYLQQNWWTLLVDLLWLLLFLAILIWM

SEQ ID NO: 87 - protein, 174 aa, Artificial Sequence
  Synthetic: Myc LMP1 NC_007605_1
MEQKLISEEDLSSSLGLALLLLLLALLFWLYIVMSDWTGGALLVLYSFALMLIIIILIIFIFRRDLLCPLGALCILLLMITLLLIALWNLHGQALFLGIVLFIFGCLLVLGIWIYLLEMLWRLGATIWQLLAFFLAFFLDLILLIIALYLQQNWWTLLVDLLWLLLFLAILIWM

SEQ ID NO: 88 - protein, 184 aa, Artificial Sequence
  Synthetic: LMP1 NC_007605_1
MEHDLERGPPGPRRPPRGPPLSSSLGLALLLLLLALLFWLYIVMSDWTGGALLVLYSFALMLIIIILIIFIFRRDLLCPLGALCILLLMITLLLIALWNLHGQALFLGIVLFIFGCLLVLGIWIYLLEMLWRLGATIWQLLAFFLAFFLDLILLIIALYLQQNWWTLLVDLLWLLLFLAILIWM

SEQ ID NO: 89 - protein, 162 aa, Artificial Sequence
  Synthetic: LMP1 NC_007605_1
MSLGLALLLLLLALLFWLYIVMSDWTGGALLVLYSFALMLIIIILIIFIFRRDLLCPLGALCILLLMITLLLIALWNLHGQALFLGIVLFIFGCLLVLGIWIYLLEMLWRLGATIWQLLAFFLAFFLDLILLIIALYLQQNWWTLLVDLLWLLLFLAILIWM

SEQ ID NO: 90 - protein, 363 aa, Artificial Sequence
  Synthetic: eTAG CRLF2 transcript variant 1 NM_022148_3
MLLLVTSLLLCELPHPAFLLIPRKVCNGIGIGEFKDSLSINATNIKHFKNCTSISGDLHILPVAFRGDSFTHTPPLDPQELDILKTVKEITGFLLIQAWPENRTDLHAFENLEIIRGRTKQHGQFSLAVVSLNITSLGLRSLKEISDGDVIISGNKNLCYANTINWKKLFGTSGQKTKIISNRGENSCKATGQVCHALCSPEGCWGPEPRDCVSCRNVSRGRECVDKCNLLEGEPREFVENSECIQCHPECLPQAMNITCTGRGPDNCIQCAHYIDGPHCVKTCPAGVMGENNTLVWKYADAGHVCHLCHPNCTYGCTGPGLEGCPTNGAETPTPPKPKLSKCILISSLAILLMVSLLLLSLW

SEQ ID NO: 91 - protein, 227 aa, Artificial Sequence
  Synthetic: eTAG CRLF2 transcript variant 1 NM_022148_3
MLLLVTSLLLCELPHPAFLLIPRKVCNGIGIGEFKDSLSINATNIKHFKNCTSISGDLHILPVAFRGDSFTHTPPLDPQELDILKTVKEITGFLLIQAWPENRTDLHAFENLEIIRGRTKQHGQFSLAVVSLNITSLGLRSLKEISDGDVIISGNKNLCYANTINWKKLFGTSGQKTKIISNRGENSCKATGQAETPTPPKPKLSKCILISSLAILLMVSLLLLSLW

SEQ ID NO: 92 - protein, 354 aa, Artificial Sequence
  Synthetic: eTAG CSF2RB NM_000395_2
MLLLVTSLLLCELPHPAFLLIPRKVCNGIGIGEFKDSLSINATNIKHFKNCTSISGDLHILPVAFRGDSFTHTPPLDPQELDILKTVKEITGFLLIQAWPENRTDLHAFENLEIIRGRTKQHGQFSLAVVSLNITSLGLRSLKEISDGDVIISGNKNLCYANTINWKKLFGTSGQKTKIISNRGENSCKATGQVCHALCSPEGCWGPEPRDCVSCRNVSRGRECVDKCNLLEGEPREFVENSECIQCHPECLPQAMNITCTGRGPDNCIQCAHYIDGPHCVKTCPAGVMGENNTLVWKYADAGHVCHLCHPNCTYGCTGPGLEGCPTNGTESVLPMWVLALIEIFLTIAVLLAL

SEQ ID NO: 93 - protein, 218 aa, Artificial Sequence
  Synthetic: eTAG CSF2RB NM_000395_2
MLLLVTSLLLCELPHPAFLLIPRKVCNGIGIGEFKDSLSINATNIKHFKNCTSISGDLHILPVAFRGDSFTHTPPLDPQELDILKTVKEITGFLLIQAWPENRTDLHAFENLEIIRGRTKQHGQFSLAVVSLNITSLGLRSLKEISDGDVIISGNKNLCYANTINWKKLFGTSGQKTKIISNRGENSCKATGQTESVLPMWVLALIEIFLTIAVLLAL

SEQ ID NO: 94 - protein, 360 aa, Artificial Sequence
  Synthetic: eTAG CSF3R transcript variant 1 NM_000760_3
MLLLVTSLLLCELPHPAFLLIPRKVCNGIGIGEFKDSLSINATNIKHFKNCTSISGDLHILPVAFRGDSFTHTPPLDPQELDILKTVKEITGFLLIQAWPENRTDLHAFENLEIIRGRTKQHGQFSLAVVSLNITSLGLRSLKEISDGDVIISGNKNLCYANTINWKKLFGTSGQKTKIISNRGENSCKATGQVCHALCSPEGCWGPEPRDCVSCRNVSRGRECVDKCNLLEGEPREFVENSECIQCHPECLPQAMNITCTGRGPDNCIQCAHYIDGPHCVKTCPAGVMGENNTLVWKYADAGHVCHLCHPNCTYGCTGPGLEGCPTNGTPEGSELHIILGLFGLLLLLNCLCGTAWLCC

SEQ ID NO: 95 - protein, 224 aa, Artificial Sequence
  Synthetic: eTAG CSF3R transcript variant 1 NM_000760_3
MLLLVTSLLLCELPHPAFLLIPRKVCNGIGIGEFKDSLSINATNIKHFKNCTSISGDLHILPVAFRGDSFTHTPPLDPQELDILKTVKEITGFLLIQAWPENRTDLHAFENLEIIRGRTKQHGQFSLAVVSLNITSLGLRSLKEISDGDVIISGNKNLCYANTINWKKLFGTSGQKTKIISNRGENSCKATGQTPEGSELHIILGLFGLLLLLNCLCGTAWLCC

SEQ ID NO: 96 - protein, 359 aa, Artificial Sequence
  Synthetic: eTAG EPOR transcript variant 1 NM_000121_3
MLLLVTSLLLCELPHPAFLLIPRKVCNGIGIGEFKDSLSINATNIKHFKNCTSISGDLHILPVAFRGDSFTHTPPLDPQELDILKTVKEITGFLLIQAWPENRTDLHAFENLEIIRGRTKQHGQFSLAVVSLNITSLGLRSLKEISDGDVIISGNKNLCYANTINWKKLFGTSGQKTKIISNRGENSCKATGQVCHALCSPEGCWGPEPRDCVSCRNVSRGRECVDKCNLLEGEPREFVENSECIQCHPECLPQAMNITCTGRGPDNCIQCAHYIDGPHCVKTCPAGVMGENNTLVWKYADAGHVCHLCHPNCTYGCTGPGLEGCPTNGTPSDLDPCCLTLSLILVVILVLLTVLALLS

SEQ ID NO: 97 - protein, 223 aa, Artificial Sequence
  Synthetic: eTAG EPOR transcript variant 1 NM_000121_3
MLLLVTSLLLCELPHPAFLLIPRKVCNGIGIGEFKDSLSINATNIKHFKNCTSISGDLHILPVAFRGDSFTHTPPLDPQELDILKTVKEITGFLLIQAWPENRTDLHAFENLEIIRGRTKQHGQFSLAVVSLNITSLGLRSLKEISDGDVIISGNKNLCYANTINWKKLFGTSGQKTKIISNRGENSCKATGQTPSDLDPCCLTLSLILVVILVLLTVLALLS

SEQ ID NO: 98 - protein, 368 aa, Artificial Sequence
  Synthetic: eTAG GHR transcript variant 1 NM_000163_4
MLLLVTSLLLCELPHPAFLLIPRKVCNGIGIGEFKDSLSINATNIKHFKNCTSISGDLHILPVAFRGDSFTHTPPLDPQELDILKTVKEITGFLLIQAWPENRTDLHAFENLEIIRGRTKQHGQFSLAVVSLNITSLGLRSLKEISDGDVIISGNKNLCYANTINWKKLFGTSGQKTKIISNRGENSCKATGQVCHALCSPEGCWGPEPRDCVSCRNVSRGRECVDKCNLLEGEPREFVENSECIQCHPECLPQAMNITCTGRGPDNCIQCAHYIDGPHCVKTCPAGVMGENNTLVWKYADAGHVCHLCHPNCTYGCTGPGLEGCPTNGTLPQMSQFTCCEDFYFPWLLCIIFGIFGLTVMLFVFLFS

SEQ ID NO: 99 - protein, 232 aa, Artificial Sequence
  Synthetic: eTAG GHR transcript variant 1 NM_000163_4
MLLLVTSLLLCELPHPAFLLIPRKVCNGIGIGEFKDSLSINATNIKHFKNCTSISGDLHILPVAFRGDSFTHTPPLDPQELDILKTVKEITGFLLIQAWPENRTDLHAFENLEIIRGRTKQHGQFSLAVVSLNITSLGLRSLKEISDGDVIISGNKNLCYANTINWKKLFGTSGQKTKIISNRGENSCKATGQTLPQMSQFTCCEDFYFPWLLCIIFGIFGLTVMLFVFLFS

SEQ ID NO: 100 - protein, 360 aa, Artificial Sequence
  Synthetic: eTAG truncated after Fn F523C IL27RA NM_004843_3
MLLLVTSLLLCELPHPAFLLIPRKVCNGIGIGEFKDSLSINATNIKHFKNCTSISGDLHILPVAFRGDSFTHTPPLDPQELDILKTVKEITGFLLIQAWPENRTDLHAFENLEIIRGRTKQHGQFSLAVVSLNITSLGLRSLKEISDGDVIISGNKNLCYANTINWKKLFGTSGQKTKIISNRGENSCKATGQVCHALCSPEGCWGPEPRDCVSCRNVSRGRECVDKCNLLEGEPREFVENSECIQCHPECLPQAMNITCTGRGPDNCIQCAHYIDGPHCVKTCPAGVMGENNTLVWKYADAGHVCHLCHPNCTYGCTGPGLEGCPTNGHLPDNTLRWKVLPGILCLWGLFLLGCGLSLA

SEQ ID NO: 101 - protein, 224 aa, Artificial Sequence
  Synthetic: eTAG truncated after Fn F523C IL27RA NM_004843_3
MLLLVTSLLLCELPHPAFLLIPRKVCNGIGIGEFKDSLSINATNIKHFKNCTSISGDLHILPVAFRGDSFTHTPPLDPQELDILKTVKEITGFLLIQAWPENRTDLHAFENLEIIRGRTKQHGQFSLAVVSLNITSLGLRSLKEISDGDVIISGNKNLCYANTINWKKLFGTSGQKTKIISNRGENSCKATGQHLPDNTLRWKVLPGILCLWGLFLLGCGLSLA

SEQ ID NO: 102 - protein, 359 aa, Artificial Sequence
  Synthetic: eTAG truncated after Fn S505N MPL NM_005373_2
MLLLVTSLLLCELPHPAFLLIPRKVCNGIGIGEFKDSLSINATNIKHFKNCTSISGDLHILPVAFRGDSFTHTPPLDPQELDILKTVKEITGFLLIQAWPENRTDLHAFENLEIIRGRTKQHGQFSLAVVSLNITSLGLRSLKEISDGDVIISGNKNLCYANTINWKKLFGTSGQKTKIISNRGENSCKATGQVCHALCSPEGCWGPEPRDCVSCRNVSRGRECVDKCNLLEGEPREFVENSECIQCHPECLPQAMNITCTGRGPDNCIQCAHYIDGPHCVKTCPAGVMGENNTLVWKYADAGHVCHLCHPNCTYGCTGPGLEGCPTNGETATETAWISLVTALHLVLGLNAVLGLLLL

SEQ ID NO: 103 - protein, 223 aa, Artificial Sequence
  Synthetic: eTAG truncated after Fn S505N MPL NM_005373_2
MLLLVTSLLLCELPHPAFLLIPRKVCNGIGIGEFKDSLSINATNIKHFKNCTSISGDLHILPVAFRGDSFTHTPPLDPQELDILKTVKEITGFLLIQAWPENRTDLHAFENLEIIRGRTKQHGQFSLAVVSLNITSLGLRSLKEISDGDVIISGNKNLCYANTINWKKLFGTSGQKTKIISNRGENSCKATGQETATETAWISLVTALHLVLGLNAVLGLLLL

SEQ ID NO: 104 - protein, 368 aa, Artificial Sequence
  Synthetic: eTag 0A JUN NM_002228_3
MLLLVTSLLLCELPHPAFLLIPRKVCNGIGIGEFKDSLSINATNIKHFKNCTSISGDLHILPVAFRGDSFTHTPPLDPQELDILKTVKEITGFLLIQAWPENRTDLHAFENLEIIRGRTKQHGQFSLAVVSLNITSLGLRSLKEISDGDVIISGNKNLCYANTINWKKLFGTSGQKTKIISNRGENSCKATGQVCHALCSPEGCWGPEPRDCVSCRNVSRGRECVDKCNLLEGEPREFVENSECIQCHPECLPQAMNITCTGRGPDNCIQCAHYIDGPHCVKTCPAGVMGENNTLVWKYADAGHVCHLCHPNCTYGCTGPGLEGCPTNGLERIARLEEKVKTLKAQNSELASTANMLREQVAQLKQKV

SEQ ID NO: 105 - protein, 369 aa, Artificial Sequence
  Synthetic: eTag 1A JUN NM_002228_3
MLLLVTSLLLCELPHPAFLLIPRKVCNGIGIGEFKDSLSINATNIKHFKNCTSISGDLHILPVAFRGDSFTHTPPLDPQELDILKTVKEITGFLLIQAWPENRTDLHAFENLEIIRGRTKQHGQFSLAVVSLNITSLGLRSLKEISDGDVIISGNKNLCYANTINWKKLFGTSGQKTKIISNRGENSCKATGQVCHALCSPEGCWGPEPRDCVSCRNVSRGRECVDKCNLLEGEPREFVENSECIQCHPECLPQAMNITCTGRGPDNCIQCAHYIDGPHCVKTCPAGVMGENNTLVWKYADAGHVCHLCHPNCTYGCTGPGLEGCPTNGLERIARLEEKVKTLKAQNSELASTANMLREQVAQLKQKVA

SEQ ID NO: 106 - protein, 369 aa, Artificial Sequence
  Synthetic: eTag 2A JUN NM_002228_3
MLLLVTSLLLCELPHPAFLLIPRKVCNGIGIGEFKDSLSINATNIKHFKNCTSISGDLHILPVAFRGDSFTHTPPLDPQELDILKTVKEITGFLLIQAWPENRTDLHAFENLEIIRGRTKQHGQFSLAVVSLNITSLGLRSLKEISDGDVIISGNKNLCYANTINWKKFGTSGQKTKIISNRGENSCKATGQVCHALCSPEGCWGPEPRDCVSCRNVSRGRECVDKCNLLEGEPREFVENSECIQCHPECLPQAMNITCTGRGPDNCIQCAHYIDGPHCVKTCPAGVMGENNTLVWKYADAGHVCHLCHPNCTYGCTGPGLEGCPTNGLERIARLEEKVKTLKAQNSELASTANMLREQVAQLKQKVAA

SEQ ID NO: 107 - protein, 371 aa, Artificial Sequence
  Synthetic: eTag 3A JUN NM_002228_3
MLLLVTSLLLCELPHPAFLLIPRKVCNGIGIGEFKDSLSINATNIKHFKNCTSISGDLHILPVAFRGDSFTHTPPLDPQELDILKTVKEITGFLLIQAWPENRTDLHAFENLEIIRGRTKQHGQFSLAVVSLNITSLGLRSLKEISDGDVIISGNKNLCYANTINWKKLFGTSGQKTKIISNRGENSCKATGQVCHALCSPEGCWGPEPRDCVSCRNVSRGRECVDKCNLLEGEPREFVENSECIQCHPECLPQAMNITCTGRGPDNCIQCAHYIDGPHCVKTCPAGVMGENNTLVWKYADAGHVCHLCHPNCTYGCTGPGLEGCPTNGLERIARLEEKVKTLKAQNSELASTANMLREQVAQLKQKVAAA

SEQ ID NO: 108 - protein, 372 aa, Artificial Sequence
  Synthetic: eTag 4A JUN NM_002228_3
MLLLVTSLLLCELPHPAFLLIPRKVCNGIGIGEFKDSLSINATNIKHFKNCTSISGDLHILPVAFRGDSFTHTPPLDPQELDILKTVKEITGFLLIQAWPENRTDLHAFENLEIIRGRTKQHGQFSLAVVSLNITSLGLRSLKEISDGDVIISGNKNLCYANTINWKKLFGTSGQKTKIISNRGENSCKATGQVCHALCSPEGCWGPEPRDCVSCRNVSRGRECVDKCNLLEGEPREFVENSECIQCHPECLPQAMNITCTGRGPDNCIQCAHYIDGPHCVKTCPAGVMGENNTLVWKYADAGHVCHLCHPNCTYGCTGPGLEGCPTNGLERIARLEEKVKTLKAQNSELASTANMLREQVAQLKQKVAAAA

SEQ ID NO: 109 - protein, 69 aa, Artificial Sequence
  Synthetic: Myc Tag 0A JUN NM_002228_3
MTILGTTFGMVFSLLQVVSGEQKLISEEDLLERIARLEEKVKTLKAQNSELASTANMLREQVAQLKQKV

SEQ ID NO: 110 - protein, 70 aa, Artificial Sequence
  Synthetic: Myc Tag 1A JUN NM_002228_3
MTILGTTFGMVFSLLQVVSGEQKLISEEDLLERIARLEEKVKTLKAQNSELASTANMLREQVAQLKQKVA

SEQ ID NO: 111 - protein, 71 aa, Artificial Sequence
  Synthetic: Myc Tag 2A JUN NM_002228_3
MTILGTTFGMVFSLLQVVSGEQKLISEEDLLERIARLEEKVKTLKAQNSELASTANMLREQVAQLKQKVAA

SEQ ID NO: 112 - protein, 72 aa, Artificial Sequence
  Synthetic: Myc Tag 3A JUN NM_002228_3
MTILGTTFGMVFSLLQVVSGEQKLISEEDLLERIARLEEKVKTLKAQNSELASTANMLREQVAQLKQKVAAA

SEQ ID NO: 113 - protein, 73 aa, Artificial Sequence
  Synthetic: Myc Tag 4A JUN NM_002228_3
MTILGTTFGMVFSLLQVVSGEQKLISEEDLLERIARLEEKVKTLKAQNSELASTANMLREQVAQLKQKVAAAA

SEQ ID NO: 114 - protein, 23 aa, Artificial Sequence
  Synthetic: CD2 transcript variant 1 NM_001328609_1
LIIGICGGGSLLMVFVALLVFYI

SEQ ID NO: 115 - protein, 21 aa, Artificial Sequence
  Synthetic: CD3D transcript variant 1 NM_000732_4
GIIVTDVIATLLLALGVFCFA

SEQ ID NO: 116 - protein, 26 aa, Artificial Sequence
  Synthetic: CD3E NM_000733_3
VMSVATIVIVDICITGGLLLLVYYWS

SEQ ID NO: 117 - protein, 21 aa, Artificial Sequence
  Synthetic: CD3G NM_000073_2
GFLFAEIVSIFVLAVGVYFIA

SEQ ID NO: 118 - protein, 21 aa, Artificial Sequence
  Synthetic: CD3Z CD247 transcript variant 1 NM_198053_2
LCYLLDGILFIYGVILTALFL

SEQ ID NO: 119 - protein, 22 aa, Artificial Sequence
  Synthetic: CD4 transcript variant 1 and 2 NM_000616_4
MALIVLGGVAGLLLFIGLGIFF

SEQ ID NO: 120 - protein, 21 aa, Artificial Sequence
  Synthetic: CD8A transcript variant 1 NM_001768_6
IYIWAPLAGTCGVLLLSLVIT

SEQ ID NO: 121 - protein, 23 aa, Artificial Sequence
  Synthetic: CD8B transcript variant 2 NM_172213_3
LGLLVAGVLVLLVSLGVAIHLCC

SEQ ID NO: 122 - protein, 21 aa, Artificial Sequence
  Synthetic: CD27 NM_001242_4
ILVIFSGMFLVFTLAGALFLH

SEQ ID NO: 123 - protein, 27 aa, Artificial Sequence
  Synthetic: CD28 transcript variant 1 NM_006139_3
FWVLVVVGGVLACYSLLVTVAFIIFWV

SEQ ID NO: 124 - protein, 22 aa, Artificial Sequence
  Synthetic: CD40 transcript variant 1 and 6 NM_001250_5
ALVVIPIIFGILFAILLVLVFI

SEQ ID NO: 125 - protein, 22 aa, Artificial Sequence
  Synthetic: CD79A transcript variant 1 NM_001783_3
IITAEGIILLFCAVVPGTLLLF

SEQ ID NO: 126 - protein, 22 aa, Artificial Sequence
  Synthetic: CD79B transcript variant 3 NM_001039933_2
GIIMIQTLLIILFIIVPIFLLL

SEQ ID NO: 127 - protein, 21 aa, Artificial Sequence
  Synthetic: CRLF2 transcript variant 1 NM_022148_3
FILISSLAILLMVSLLLLSLW

SEQ ID NO: 128 - protein, 21 aa, Artificial Sequence
  Synthetic: CRLF2 transcript variant 1 NM_022148_3
CILISSLAILLMVSLLLLSLW

SEQ ID NO: 129 - protein, 26 aa, Artificial Sequence
  Synthetic: CSF2RA transcript variant 7 and 8 NM_001161529_1
NLGSVYIYVLLIVGTLVCGIVLGFLF

SEQ ID NO: 130 - protein, 19 aa, Artificial Sequence
  Synthetic: CSF2RB NM_000395_2
MWVLALIVIFLTIAVLLAL

SEQ ID NO: 131 - protein, 19 aa, Artificial Sequence
  Synthetic: CSF2RB NM_000395_2
MWVLALIEIFLTIAVLLAL

SEQ ID NO: 132 - protein, 23 aa, Artificial Sequence
  Synthetic: CSF3R transcript variant 1 NM_000760_3
IILGLFGLLLLLTCLCGTAWLCC

SEQ ID NO: 133 - protein, 23 aa, Artificial Sequence
  Synthetic: CSF3R transcript variant 1 NM_000760_3
IILGLFGLLLLLNCLCGTAWLCC

SEQ ID NO: 134 - protein, 23 aa, Artificial Sequence
  Synthetic: EPOR transcript variant 1 NM_000121_3
LILTLSLILVVILVLLTVLALLS

SEQ ID NO: 135 - protein, 23 aa, Artificial Sequence
  Synthetic: EPOR transcript variant 1 NM_000121_3
CCLTLSLILVVILVLLTVLALLS

SEQ ID NO: 136 - protein, 21 aa, Artificial Sequence
  Synthetic: FCER1G NM_004106_1
LCYILDAILFLYGIVLTLLYC

SEQ ID NO: 137 - protein, 23 aa, Artificial Sequence
  Synthetic: FCGR2C NM_201563_5
IIVAVVTGIAVAAIVAAVVALIY

SEQ ID NO: 138 - protein, 23 aa, Artificial Sequence
  Synthetic: FCGRA2 transcript variant 1 NM_001136219_1
IIVAVVIATAVAAIVAAVVALIY

SEQ ID NO: 139 - protein, 24 aa, Artificial Sequence
  Synthetic: GHR transcript variant 1 NM_000163_4
FPWLLIIIFGIFGLTVMLFVFLFS

SEQ ID NO: 140 - protein, 24 aa, Artificial Sequence
  Synthetic: GHR transcript variant 1 NM_000163_4
FPWLLCIIFGIFGLTVMLFVFLFS

SEQ ID NO: 141 - protein, 21 aa, Artificial Sequence
  Synthetic: ICOS NM_012092.3
FWLPIGCAAFVVVCILGCILI

SEQ ID NO: 142 - protein, 21 aa, Artificial Sequence
  Synthetic: IFNAR1 NM_000629_2
IWLIVGICIALFALPFVIYAA

SEQ ID NO: 143 - protein, 21 aa, Artificial Sequence
  Synthetic: IFNAR2 transcript variant 1 NM_207585_2
IGGIITVFLIALVLTSTIVTL

SEQ ID NO: 144 - protein, 21 aa, Artificial Sequence
  Synthetic: IFNGR1 NM_000416_2
SLWIPVVAALLLFLVLSLVFI

SEQ ID NO: 145 - protein, 21 aa, Artificial Sequence
  Synthetic: IFNGR2 transcript variant 1 NM_001329128_1
VILISVGTFSLLSVLAGACFF

SEQ ID NO: 146 - protein, 21 aa, Artificial Sequence
  Synthetic: IFNLR1 NM_170743_3
FLVLPSLLILLLVIAAGGVIW

SEQ ID NO: 147 - protein, 23 aa, Artificial Sequence
  Synthetic: IL1R1 transcript variant 2 NM_001288706_1
HMIGICVTLTVIIVCSVFIYKIF

SEQ ID NO: 148 - protein, 21 aa, Artificial Sequence
  Synthetic: IL1RAP transcript variant 1 NM_002182_3
VLLVVILIVVYHVYWLEMVLF

SEQ ID NO: 149 - protein, 21 aa, Artificial Sequence
  Synthetic: IL1RL1 transcript variant 1 NM_016232.4
IYCIIAVCSVFLMLINVLVII

SEQ ID NO: 150 - protein, 21 aa, Artificial Sequence
  Synthetic: IL1RL2 NM_003854.2
AYLIGGLIALVAVAVSVVYIY

SEQ ID NO: 151 - protein, 19 aa, Artificial Sequence
  Synthetic: IL2RA transcript variant 1 NM_000417_2
VAVAGCVFLLISVLLLSGL

SEQ ID NO: 152 - protein, 25 aa, Artificial Sequence
  Synthetic: IL2RB transcript variant 1 NM_000878_4
IPWLGHLLVGLSGAFGFIILVYLLI

SEQ ID NO: 153 - protein, 21 aa, Artificial Sequence
  Synthetic: IL2RG NM_000206_2
VVISVGSMGLIISLLCVYFWL

SEQ ID NO: 154 - protein, 20 aa, Artificial Sequence
  Synthetic: IL3RA transcript variant 1 and 2 NM_002183_3
TSLLIALGTLLALVCVFVIC

SEQ ID NO: 155 - protein, 24 aa, Artificial Sequence
  Synthetic: IL4R transcript variant 1 NM_000418_3
LLLGVSVSCIVILAVCLLCYVSIT

SEQ ID NO: 156 - protein, 20 aa, Artificial Sequence
  Synthetic: IL5RA transcript variant 1 NM_000564_4
FVIVIMATICFILLILSLIC

SEQ ID NO: 157 - protein, 21 aa, Artificial Sequence
  Synthetic: IL6R transcript variant 1 NM_000565_3
TFLVAGGSLAFGTLLCIAIVL

SEQ ID NO: 158 - protein, 22 aa, Artificial Sequence
  Synthetic: IL6ST transcript variant 1 and 3 NM_002184_3
AIVVPVCLAFLLTTLLGVLFCF

SEQ ID NO: 159 - protein, 23 aa, Artificial Sequence
  Synthetic: IL7RA NM_002185_3
ILLTISILSFFSVALLVILACVL

SEQ ID NO: 160 - protein, 27 aa, Artificial Sequence
  Synthetic: IL7RA Ins PPCL (interleukin 7 receptor)
ILLPPCLTISILSFFSVALLVILACVL

SEQ ID NO: 161 - protein, 21 aa, Artificial Sequence
  Synthetic: IL9R transcript variant 1 NM_002186_2
GNTLVAVSIFLLLTGPTYLLF

SEQ ID NO: 162 - protein, 21 aa, Artificial Sequence
  Synthetic: IL10RA transcript variant 1 NM_001558_3
VIIFFAFVLLLSGALAYCLAL

SEQ ID NO: 163 - protein, 22 aa, Artificial Sequence
  Synthetic: IL10RB NM_000628_4
WMVAVILMASVFMVCLALLGCF

SEQ ID NO: 164 - protein, 21 aa, Artificial Sequence
  Synthetic: IL11RA NM_001142784_2
SLGILSFLGLVAGALALGLWL

SEQ ID NO: 165 - protein, 25 aa, Artificial Sequence
  Synthetic: IL12RB1 transcript variant 1 and 4 NM_005535_2
WLIFFASLGSFLSILLVGVLGYLGL

SEQ ID NO: 166 - protein, 21 aa, Artificial Sequence
  Synthetic: IL12RB2 transcript variant 1 and 3 NM_001559_2
WMAFVAPSICIAIIMVGIFST

SEQ ID NO: 167 - protein, 24 aa, Artificial Sequence
  Synthetic: IL13RA1 NM_001560_2
LYITMLLIVPVIVAGAIIVLLLYL

SEQ ID NO: 168 - protein, 20 aa, Artificial Sequence
  Synthetic: IL13RA2 NM_000640_2
FWLPFGFILILVIFVTGLLL

SEQ ID NO: 169 - protein, 23 aa, Artificial Sequence
  Synthetic: IL15RA transcript variant 4 NM_001256765_1
VAISTSTVLLCGLSAVSLLACYL

SEQ ID NO: 170 - protein, 21 aa, Artificial Sequence
  Synthetic: IL17RA NM_014339_6
VYWFITGISILLVGSVILLIV

SEQ ID NO: 171 - protein, 21 aa, Artificial Sequence
  Synthetic: IL17RB NM_018725_3
LLLLSLLVATWVLVAGIYLMW

SEQ ID NO: 172 - protein, 21 aa, Artificial Sequence
  Synthetic: IL17RC transcript variant 1 NM_153460_3
WALVWLACLLFAAALSLILLL

SEQ ID NO: 173 - protein, 21 aa, Artificial Sequence
  Synthetic: IL17RD transcript variant 2 NM_017563_4
AVAITVPLVVISAFATLFTVM

SEQ ID NO: 174 - protein, 21 aa, Artificial Sequence
  Synthetic: IL17RE transcript variant 1 NM_153480_1
LGLLILALLALLTLLGVVLAL

SEQ ID NO: 175 - protein, 21 aa, Artificial Sequence
  Synthetic: IL18R1 transcript variant 1 NM_003855_3
GMIIAVLILVAVVCLVTVCVI

SEQ ID NO: 176 - protein, 21 aa, Artificial Sequence
  Synthetic: IL18RAP NM_003853_3
GVVLLYILLGTIGTLVAVLAA

SEQ ID NO: 177 - protein, 21 aa, Artificial Sequence
  Synthetic: IL20RA transcript variant 1 NM_014432_3
IIFWYVLPISITVFLFSVMGY

SEQ ID NO: 178 - protein, 21 aa, Artificial Sequence
  Synthetic: IL20RB NM_144717_3
VLALFAFVGFMLILVVVPLFV

SEQ ID NO: 179 - protein, 21 aa, Artificial Sequence
  Synthetic: IL21R transcript variant 2 NM_181078_2
GWNPHLLLLLLLVIVFIPAFW

SEQ ID NO: 180 - protein, 21 aa, Artificial Sequence
  Synthetic: IL22RA1 NM_021258_3
YSFSGAFLFSMGFLVAVLCYL

SEQ ID NO: 181 - protein, 21 aa, Artificial Sequence
  Synthetic: IL23R NM_144701_2
LLLGMIVFAVMLSILSLIGIF

SEQ ID NO: 182 - protein, 21 aa, Artificial Sequence
  Synthetic: IL27RA NM_004843_3
VLPGILFLWGLFLLGCGLSLA

SEQ ID NO: 183 - protein, 21 aa, Artificial Sequence
  Synthetic: IL27RA NM_004843_3
VLPGILCLWGLFLLGCGLSLA

SEQ ID NO: 184 - protein, 24 aa, Artificial Sequence
  Synthetic: IL31RA transcript variant 1 NM_139017_5
IILITSLIGGGLLILIILTVAYGL

SEQ ID NO: 185 - protein, 23 aa, Artificial Sequence
  Synthetic: LEPR transcript variant 1 NM_002303_5
AGLYVIVPVIISSSILLLGTLLI

SEQ ID NO: 186 - protein, 25 aa, Artificial Sequence
  Synthetic: LIFR NM_001127671_1
VGLIIAILIPVAVAVIVGVVTSILC

SEQ ID NO: 187 - protein, 22 aa, Artificial Sequence
  Synthetic: MPL NM_005373_2
ISLVTALHLVLGLSAVLGLLLL

SEQ ID NO: 188 - protein, 22 aa, Artificial Sequence
  Synthetic: MPL NM_005373_2
ISLVTALHLVLGLNAVLGLLLL

SEQ ID NO: 189 - protein, 21 aa, Artificial Sequence
  Synthetic: OSMR transcript variant 4 NM_001323505_1
LIHILLPMVFCVLLIMVMCYL

SEQ ID NO: 190 - protein, 24 aa, Artificial Sequence
  Synthetic: PRLR transcript variant 1 NM_000949_6
TTVWISVAVLSAVICLIIVWAVAL

SEQ ID NO: 191 - protein, 21 aa, Artificial Sequence
  Synthetic: TNFRSF4 NM_003327_3
VAAILGLGLVLGLLGPLAILL

SEQ ID NO: 192 - protein, 28 aa, Artificial Sequence
  Synthetic: TNFRSF8 transcript variant 1 NM_001243_4
PVLDAGPVLFWVILVLVVVVGSSAFLLC

SEQ ID NO: 193 - protein, 27 aa, Artificial Sequence
  Synthetic: TNFRSF9 NM_001561_5
IISFFLALTSTALLFLLFFLTLRFSVV

SEQ ID NO: 194 - protein, 21 aa, Artificial Sequence
  Synthetic: TNFRSF14 transcript variant 1 NM_003820_3
WWFLSGSLVIVIVCSTVGLII

SEQ ID NO: 195 - protein, 21 aa, Artificial Sequence
  Synthetic: TNFRSF18 transcript variant 1 NM_004195_2
LGWLTVVLLAVAACVLLLTSA

SEQ ID NO: 196 - protein, 117 aa, Artificial Sequence
  Synthetic: CD2 transcript variant 1 NM_001328609_1
TKRKKQRSRRNDEELETRAHRVATEERGRKPHQIPASTPQNPATSQHPPPPPGHRSQAPSHRPPPPGHRVQHQPQKRPPAPSGTQVHQQKGPPLPRPRVQPKPPHGAAENSLSPSSN

SEQ ID NO: 197 - protein, 45 aa, Artificial Sequence
  Synthetic: CD3D transcript variant 1 NM_000732_4
GHETGRLSGAADTQALLRNDQVYQPLRDRDDAQYSHLGGNWARNK

SEQ ID NO: 198 - protein, 55 aa, Artificial Sequence
  Synthetic: CD3E NM_000733_3
KNRKAKAKPVTRGAGAGGRQRGQNKERPPPVPNPDYEPIRKGQRDLYSGLNQRRI

SEQ ID NO: 199 - protein, 45 aa, Artificial Sequence
  Synthetic: CD3G NM_000073_2
GQDGVRQSRASDKQTLLPNDQLYQPLKDREDDQYSHLQGNQLRRN

SEQ ID NO: 200 - protein, 40 aa, Artificial Sequence
  Synthetic: CD4 transcript variant 1 and 2 NM_000616_4
CVRCRHRRRQAERMSQIKRLLSEKKTCQCPHRFQKTCSPI

SEQ ID NO: 201 - protein, 32 aa, Artificial Sequence
  Synthetic: CD8A transcript variant 1 NM_001768_6
LYCNHRNRRRVCKCPRPVVKSGDKPSLSARYV

SEQ ID NO: 202 - protein, 48 aa, Artificial Sequence
  Synthetic: CD8B transcript variant 2 NM_172213_3
RRRRARLRFMKQPQGEGISGTFVPQCLHGYYSNTTTSQKLLNPWILKT

SEQ ID NO: 203 - protein, 26 aa, Artificial Sequence
  Synthetic: CD8B transcript variant 3 NM_172101_3
RRRRARLRFMKQLRLHPLEKCSRMDY

SEQ ID NO: 204 - protein, 15 aa, Artificial Sequence
  Synthetic: CD8B transcript variant 5 NM_004931_4
RRRRARLRFMKQFYK

SEQ ID NO: 205 - protein, 48 aa, Artificial Sequence
  Synthetic: CD27 NM_001242_4
QRRKYRSNKGESPVEPAEPCRYSCPREEEGSTIPIQEDYRKPEPACSP

SEQ ID NO: 206 - protein, 41 aa, Artificial Sequence; identical to SEQ ID NO: 55
  Synthetic: mutated Delta Lck CD28 transcript variant 1 NM_006139_3

SEQ ID NO: 207 - protein, 41 aa, Artificial Sequence; identical to SEQ ID NO: 54
  Synthetic: CD28 transcript variant 1 NM_006139_3

SEQ ID NO: 208 - protein, 62 aa, Artificial Sequence
  Synthetic: CD40 transcript variant 1 and 6 NM_001250_5
KKVAKKPTNKAPHPKQEPQEINFPDDLPGSNTAAPVQETLHGCQPVTQEDGKESRISVQERQ

SEQ ID NO: 209 - protein, 66 aa, Artificial Sequence
  Synthetic: CD40 transcript variant 5 NM_001322421_1
SESSEKVAKKPTNKAPHPKQEPQEINFPDDLPGSNTAAPVQETLHGCQPVTQEDGKESRISVQERQ

SEQ ID NO: 210 - protein, 61 aa, Artificial Sequence
  Synthetic: CD79A transcript variant 1 NM_001783_3
RKRWQNEKLGLDAGDEYEDENLYEGLNLDDCSMYEDISRGLQGTYQDVGSLNIGDVQLEKP

SEQ ID NO: 211 - protein, 49 aa, Artificial Sequence
  Synthetic: CD79B transcript variant 3 NM_001039933_2
LDKDDSKAGMEEDHTYEGLDIDQTATYEDIVTLRTGEVKWSVGEHPGQE

SEQ ID NO: 212 - protein, 119 aa, Artificial Sequence
  Synthetic: CRLF2 transcript variant 1 NM_022148_3
KLWRVKKFLIPSVPDPKSIFPGLFEIHQGNFQEWITDTQNVAHLHKMAGAEQESGPEEPLVVQLAKTEAESPRMLDPQTEEKEASGGSLQLPHQPLQGGDVVTIGGFTFVMNDRSYVAL

SEQ ID NO: 213 - protein, 437 aa, Artificial Sequence
  Synthetic: CSF2RB NM_000395_2
RFCGIYGYRLRRKWEEKIPNPSKSHLFQNGSAELWPPGSMSAFTSGSPPHQGPWGSRFPELEGVFPVGFGDSEVSPLTIEDPKHVCDPPSGPDTTPAASDLPTEQPPSPQPGPPAASHTPEKQASSFDFNGPYLGPPHSRSLPDILGQPEPPQEGGSQKSPPPGSLEYLCLPAGGQVQLVPLAQAMGPGQAVEVERRPSQGAAGSPSLESGGGPAPPALGPRVGGQDQKDSPVAIPMSSGDTEDPGVASGYVSSADLVFTPNSGASSVSLVPSLGLPSDQTPSLCPGLASGPPGAPGPVKSGFEGYVELPPIEGRSPRSPRNNPVPPEAKSPVLNPGERPADVSPTSPQPEGLLVLQQVGDYCFLPGLGPGPLSLRSKPSSPGPGPEIKNLDQAFQVKKPPGQAVPQVPVIQLFKALKQQDYLSLPPWEVNKPGEVC

SEQ ID NO: 214 - protein, 54 aa, Artificial Sequence
  Synthetic: CSF2RA transcript variant 7 and 8 NM_001161529_1
KRFLRIQRLFPPVPQIKDKLNDNHEVEDEIIWEEFTPEEGKGYREEVLTVKEIT

SEQ ID NO: 215 - protein, 64 aa, Artificial Sequence
  Synthetic: CSF2RA transcript variant 9 NM_001161531_1
KRFLRIQRLFPPVPQIKDKLNDNHEVEDEMGPQRHHRCGWNLYPTPGPSPGSGSSPRLGSESSL

SEQ ID NO: 216 - protein, 186 aa, Artificial Sequence
  Synthetic: CSF3R transcript variant 1 NM_000760_3
SPNRKNPLWPSVPDPAHSSLGSWVPTIMEEDAFQLPGLGTPPITKLTVLEEDEKKPVPWESHNSSETCGLPTLVQTYVLQGDPRAVSTQPQSQSGTSDQVLYGQLLGSPTSPGPGHYLRCDSTQPLLAGLTPSPKSYENLWFQASPLGTLVTPAPSQEDDCVFGPLLNFPLLQGIRVHGMEALGSF

SEQ ID NO: 217 - protein, 213 aa, Artificial Sequence
  Synthetic: CSF3R transcript variant 3 NM_156039_3
SPNRKNPLWPSVPDPAHSSLGSWVPTIMEELPGPRQGQWLGQTSEMSRALTPHPCVQDAFQLPGLGTPPITKLTVLEEDEKKPVPWESHNSSETCGLPTLVQTYVLQGDPRAVSTQPQSQSGTSDQVLYGQLLGSPTSPGPGHYLRCDSTQPLLAGLTPSPKSYENLWFQASPLGTLVTPAPSQEDDCVFGPLLNFPLLQGIRVHGMEALGSF

SEQ ID NO: 218 - protein, 133 aa, Artificial Sequence
  Synthetic: CSF3R transcript variant 4 NM_172313_2
SPNRKNPLWPSVPDPAHSSLGSWVPTIMEEDAFQLPGLGTPPITKLTVLEEDEKKPVPWESHNSSETCGLPTLVQTYVLQGDPRAVSTQPQSQSGTSDQAGPPRRSAYFKDQIMLHPAPPNGLLCLFPITSVL

SEQ ID NO: 219 - protein, 235 aa, Artificial Sequence
  Synthetic: EPOR transcript variant 1 NM_000121_3
HRRALKQKIWPGIPSPESEFEGLFTTHKGNFQLWLYQNDGCLWWSPCTPFTEDPPASLEVLSERCWGTMQAVEPGTDDEGPLLEPVGSEHAQDTYLVLDKWLLPRNPPSEDLPGPGGSVDIVAMDEGSEASSCSSALASKPSPEGASAASFEYTILDPSSQLLRPWTLCPELPPTPPHLKYLYLVVSDSGISTDYSSGDSQGAQGGLSDGPYSNPYENSLIPAAEPLPPSYVACS

SEQ ID NO: 220 - protein, 235 aa, Artificial Sequence
  Synthetic: EPOR transcript variant 1 NM_000121_3
HRRALKQKIWPGIPSPESEFEGLFTTHKGNFQLWLYQNDGCLWWSPCTPFTEDPPASLEVLSERCWGTMQAVEPGTDDEGPLLEPVGSEHAQDTYLVLDKWLLPRNPPSEDLPGPGGSVDIVAMDEGSEASSCSSALASKPSPEGASAASFEYTILDPSSQLLRPWTLCPELPPTPPHLKFLFLVVSDSGISTDYSSGDSQGAQGGLSDGPYSNPYENSLIPAAEPLPPSYVACS

SEQ ID NO: 221 - protein, 42 aa, Artificial Sequence
  Synthetic: FCER1G NM_004106_1
RLKIQVRKAAITSYEKSDGVYTGLSTRNQETYETLKHEKPPQ

SEQ ID NO: 222 - protein, 77 aa, Artificial Sequence
  Synthetic: FCGR2C NM_201563_5
CRKKRISANSTDPVKAAQFEPPGRQMIAIRKRQPEETNNDYETADGGYMTLNPRAPTDDDKNIYLTLPPNDHVNSNN

SEQ ID NO: 223 - protein, 77 aa, Artificial Sequence
  Synthetic: FCGRA2 transcript variant 1 NM_001136219_1
CRKKRISANSTDPVKAAQFEPPGRQMIAIRKRQLEETNNDYETADGGYMTLNPRAPTDDDKNIYLTLPPNDHVNSNN

SEQ ID NO: 224 - protein, 350 aa, Artificial Sequence
  Synthetic: GHR transcript variant 1 NM_000163_4
KQQRIKMLILPPVPVPKIKGIDPDLLKEGKLEEVNTILAIHDSYKPEFHSDDSWVEFIELDIDEPDEKTEESDTDRLLSSDHEKSHSNLGVKDGDSGRTSCCEPDILETDFNANDIHEGTSEVAQPQRLKGEADLLCLDQKNQNNSPYHDACPATQQPSVIQAEKNKPQPLPTEGAESTHQAAHIQLSNPSSLSNIDFYAQVSDITPAGSVVLSPGQKNKAGMSQCDMHPEMVSLCQENFLMDNAYFCEADAKKCIPVAPHIKVESHIQPSLNQEDIYITTESLTTAAGRPGTGEHVPGSEMPVPDYTSIHIVQSPQGLILNATALPLPDKEFLSSCGYVSTDQLNKIMP

SEQ ID NO: 225 - protein, 38 aa, Artificial Sequence
  Synthetic: ICOS NM_012092.3
CWLTKKKYSSSVHDPNGEYMFMRAVNTAKKSRLTDVTL

SEQ ID NO: 226 - protein, 100 aa, Artificial Sequence
  Synthetic: IFNAR1 NM_000629_2
KVFLRCINYVFFPSLKPSSSIDEYFSEQPLKNLLLSTSEEQIEKCFIIENISTIATVEETNQTDEDHKKYSSQTSQDSGNYSNEDESESKTSEELQQDFV

SEQ ID NO: 227 - protein, 251 aa, Artificial Sequence
  Synthetic: IFNAR2 transcript variant 1 NM_207585_2
KWIGYICLRNSLPKVLNFHNFLAWPFPNLPPLEAMDMVEVIYINRKKKVWDYNYDDESDSDTEAAPRTSGGGYTMHGLTVRPLGQASATSTESQLIDPESEEEPDLPEVDVELPTMPKDSPQQLELLSGPCERRKSPLQDPFPEEDYSSTEGSGGRITFNVDLNSVFLRVLDDEDSDDLEAPLMLSSHLEEMVDPEDPDNVQSNHLLASGEGTQPTFPSPSSEGLWSEDAPSDQSDTSESDVDLGDGYIMR

SEQ ID NO: 228 - protein, 67 aa, Artificial Sequence
  Synthetic: IFNAR2 transcript variant 2 NM_000874_4
KWIGYICLRNSLPKVLRQGLAKGWNAVAIHRCSHNALQSETPELKQSSCLSFPSSWDYKRASLCPSD

SEQ ID NO: 229 - protein, 223 aa, Artificial Sequence
  Synthetic: IFNGR1 NM_000416_2
CFYIKKINPLKEKSIILPKSLISVVRSATLETKPESKYVSLITSYQPFSLEKEVVCEEPLSPATVPGMHTEDNPGKVEHTEELSSITEVVTTEENIPDVVPGSHLTPIERESSSPLSSNQSEPGSIALNSYHSRNCSESDHSRNGFDTDSSCLESHSSLSDSEFPPNNKGEIKTEGQELITVIKAPTSFGYDKPHVLVDLLVDDSGKESLIGYRPTEDSKEFS

SEQ ID NO: 230 - protein, 69 aa, Artificial Sequence
  Synthetic: IFNGR2 transcript variant 1 NM_001329128_1
LVLKYRGLIKYWFHTPPSIPLQIEEYLKDPTQPILEALDKDSSPKDDVWDSVSIISFPEKEQEDVLQTL

SEQ ID NO: 231 - protein, 271 aa, Artificial Sequence
  Synthetic: IFNLR1 NM_170743_3
KTLMGNPWFQRAKMPRALDFSGHTHPVATFQPSRPESVNDLFLCPQKELTRGVRPTPRVRAPATQQTRWKKDLAEDEEEEDEEDTEDGVSFQPYIEPPSFLGQEHQAPGHSEAGGVDSGRPRAPLVPSEGSSAWDSSDRSWASTVDSSWDRAGSSGYLAEKGPGQGPGGDGHQESLPPPEFSKDSGFLEELPEDNLSSWATWGTLPPEPNLVPGGPPVSLQTLTFCWESSPEEEEEARESEIEDSDAGSWGAESTQRTEDRGRTLGHYMAR

SEQ ID NO: 232 - protein, 242 aa, Artificial Sequence
  Synthetic: IFNLR1 transcript variant 2 NM_173064_2
KTLMGNPWFQRAKMPRALELTRGVRPTPRVRAPATQQTRWKKDLAEDEEEEDEEDTEDGVSFQPYIEPPSFLGQEHQAPGHSEAGGVDSGRPRAPLVPSEGSSAWDSSDRSWASTVDSSWDRAGSSGYLAEKGPGQGPGGDGHQESLPPPEFSKDSGFLEELPEDNLSSWATWGTLPPEPNLVPGGPPVSLQTLTFCWESSPEEEEEARESEIEDSDAGSWGAESTQRTEDRGRTLGHYMAR

SEQ ID NO: 233 - protein, 179 aa, Artificial Sequence
  Synthetic: IL1R1 transcript variant 2 NM_001288706_1
KIDIVLWYRDSCYDFLPIKVLPEVLEKQCGYKLFIYGRDDYVGEDIVEVINENVKKSRRLIIILVRETSGFSWLGGSSEEQIAMYNALVQDGIKVVLLELEKIQDYEKMPESIKFIKQKHGAIRWSGDFTQGPQSAKTRFWKNVRYHMPVQRRSPSSKHQLLSPATKEKLQREAHVPLG

SEQ ID NO: 234 - protein, 210 aa, Artificial Sequence
  Synthetic: IL1R1 transcript variant 3 NM_001320978_1
KIDIVLWYRDSCYDFLPIKASDGKTYDAYILYPKTVGEGSTSDCDIFVFKVLPEVLEKQCGYKLFIYGRDDYVGEDIVEVINENVKKSRRLIIILVRETSGFSWLGGSSEEQIAMYNALVQDGIKVVLLELEKIQDYEKMPESIKFIKQKHGAIRWSGDFTQGPQSAKTRFWKNVRYHMPVQRRSPSSKHQLLSPATKEKLQREAHVPLG

SEQ ID NO: 235 - protein, 182 aa, Artificial Sequence
  Synthetic: IL1RAP transcript variant 1 NM_002182_3
YRAHFGTDETILDGKEYDIYVSYARNAEEEEFVLLTLRGVLENEFGYKLCIFDRDSLPGGIVTDETLSFIQKSRRLLVVLSPNYVLQGTQALLELKAGLENMASRGNINVILVQYKAVKETKVKELKRAKTVLTVIKWKGEKSKYPQGRFWKQLQVAMPVKKSPRRSSSDEQGLSYSSLKNV

SEQ ID NO: 236 - protein, 299 aa, Artificial Sequence
  Synthetic: IL1RAP transcript variant 6 NM_001167931_1
YRAHFGTDETILDGKEYDIYVSYARNAEEEEFVLLTLRGVLENEFGYKLCIFDRDSLPGGNTVEAVFDFIQRSRRMIVVLSPDYVTEKSISMLEFKLGVMCQNSIATKLIVVEYRPLEHPHPGILQLKESVSFVSWKGEKSKHSGSKFWKALRLALPLRSLSASSGWNESCSSQSDISLDHVQRRRSRLKEPPELQSSERAAGSPPAPGTMSKHRGKSSATCRCCVTYCEGENHLRNKSRAEIHNQPQWETHLCKPVPQESETQWIQNGTRLEPPAPQISALALHHFTDLSNNNDFYIL

SEQ ID NO: 237 - protein, 207 aa, Artificial Sequence
  Synthetic: IL1RL1 transcript variant 1 NM_016232.4
LKMFWIEATLLWRDIAKPYKTRNDGKLYDAYVVYPRNYKSSTDGASRVEHFVHQILPDVLENKCGYTLCIYGRDMLPGEDVVTAVETNIRKSRRHIFILTPQITHNKEFAYEQEVALHCALIQNDAKVILIEMEALSELDMLQAEALQDSLQHLMKVQGTIKWREDHIANKRSLNSKFWKHVRYQMPVPSKIPRKASSLTPLAAQKQ

SEQ ID NO: 238 - protein, 219 aa, Artificial Sequence
  Synthetic: IL1RL2 NM_003854.2
NIFKIDIVLWYRSAFHSTETIVDGKLYDAYVLYPKPHKESQRHAVDALVLNILPEVLERQCGYKLFIFGRDEFPGQAVANVIDENVKLCRRLIVIVVPESLGFGLLKNLSEEQIAVYSALIQDGMKVILIELEKIEDYTVMPESIQYIKQKHGAIRWHGDFTEQSQCMKTKFWKTVRYHMPPRRCRPFPPVQLLQHTPCYRTAGPELGSRRKKCTLTTG

SEQ ID NO: 239 - protein, 13 aa, Artificial Sequence
  Synthetic: IL2RA transcript variant 1 NM_000417_2
TWQRRQRKSRRTI

SEQ ID NO: 240 - protein, 286 aa, Artificial Sequence
  Synthetic: IL2RB transcript variant 1 NM_000878_4
NCRNTGPWLKKVLKCNTPDPSKFFSQLSSEHGGDVQKWLSSPFPSSSFSPGGLAPEISPLEVLERDKVTQLLLQQDKVPEPASLSSNHSLTSCFTNQGYFFFHLPDALEIEACQVYFTYDPYSEEDPDEGVAGAPTGSSPQPLQPLSGEDDAYCTFPSRDDLLLFSPSLLGGPSPPSTAPGGSGAGEERMPPSLQERVPRDWDPQPLGPPTPGVPDLVDFQPPPELVLREAGEEVPDAGPREGVSFPWSRPPGQGEFRALNARLPLNTDAYLSLQELQGQDPTHLV

SEQ ID NO: 241 - protein, 86 aa, Artificial Sequence
  Synthetic: IL2RG NM_000206_2
ERTMPRIPTLKNLEDLVTEYHGNFSAWSGVSKGLAESLQPDYSERLCLVSEIPPKGGALGEGPGASPCNQHSPYWAPPCYTLKPET

SEQ ID NO: 242 - protein, 53 aa, Artificial Sequence
  Synthetic: IL3RA transcript variant 1 and 2 NM_002183_3
RRYLVMQRLFPRIPHMKDPIGDSFQNDKLVVWEAGKAGLEECLVTEVQVVQKT

SEQ ID NO: 243 - protein, 569 aa, Artificial Sequence
  Synthetic: IL4R transcript variant 1 NM_000418_3
KIKKEWWDQIPNPARSRLVAIIIQDAQGSQWEKRSRGQEPAKCPHWKNCLTKLLPCFLEHNMKRDEDPHKAAKEMPFQGSGKSAWCPVEISKTVLWPESISVVRCVELFEAPVECEEEEEVEEEKGSFCASPESSRDDFQEGREGIVARLTESLFLDLLGEENGGFCQQDMGESCLLPPSGSTSAHMPWDEFPSAGPKEAPPWGKEQPLHLEPSPPASPTQSPDNLTCTETPLVIAGNPAYRSFSNSLSQSPCPRELGPDPLLARHLEEVEPEMPCVPQLSEPTTVPQPEPETWEQILRRNVLQHGAAAAPVSAPTSGYQEFVHAVEQGGTQASAVVGLGPPGEAGYKAFSSLLASSAVSPEKCGFGASSGEEGYKPFQDLIPGCPGDPAPVPVPLFTFGLDREPPRSPQSSHLPSSSPEHLGLEPGEKVEDMPKPPLPQEQATDPLVDSLGSGIVYSALTCHLCGHLKQCHGQEDGGQTPVMASPCCGCCCGDRSSPPTTPLRAPDPSPGGVPLEASLCPASLAPSGISEKSKSSSSFHPAPGNAQSSSQTPKIVNFVSVGPTYMRVS

SEQ ID NO: 244 - protein, 569 aa, Artificial Sequence; identical to SEQ ID NO: 243
  Synthetic: IL4R transcript variant 1 NM_000418_3

SEQ ID NO: 245 - protein, 58 aa, Artificial Sequence
  Synthetic: IL5RA transcript variant 1 NM_000564_4
KICHLWIKLFPPIPAPKSNIKDLFVTTNYEKAGSSETEIEVICYIEKPGVETLEDSVF

SEQ ID NO: 246 - protein, 82 aa, Artificial Sequence
  Synthetic: IL6R transcript variant 1 NM_000565_3
RFKKTWKLRALKEGKTSMHPPYSLGQLVPERPRPTPVLVPLISPPVSPSSLGSDNTSSHNRPDARDPRSPYDISNTDYFFPR

SEQ ID NO: 247 - protein, 277 aa, Artificial Sequence
  Synthetic: IL6ST transcript variant 1 and 3 NM_002184_3
NKRDLIKKHIWPNVPDPSKSHIAQWSPHTPPRHNFNSKDQMYSDGNFTDVSVVEIEANDKKPFPEDLKSLDLFKKEKINTEGHSSGIGGSSCMSSSRPSISSSDENESSQNTSSTVQYSTVVHSGYRHQVPSVQVFSRSESTQPLLDSEERPEDLQLVDHVDGGDGILPRQQYFKQNCSQHESSPDISHFERSKQVSSVNEEDFVRLKQQISDHISQSCGSGQMKMFQEVSAADAFGPGTEGQVERFETVGMEAATDEGMPKSYLPQTVRQGGYMPQ

SEQ ID NO: 248 - protein, 196 aa, Artificial Sequence
  Synthetic: IL7RA Isoform 1 NM_002185.4
WKKRIKPIVWPSLPDHKKTLEHLCKKPRKNLNVSFNPESFLDCQIHRVDDIQARDEVEGFLQDTFPQQLEESEKQRLGGDVQSPNCPSEDVVITPESFGRDSSLTCLAGNVSACDAPILSSSRSLDCRESGKNGPHVYQDLLLSLGTTNSTLPPPFSLQSGILTLNPVAQGQPILTSLGSNQEEAYVTMSSFYQNQ

SEQ ID NO: 249 - protein, 35 aa, Artificial Sequence
  Synthetic: IL7RA Isoform 3 (C-term deletion) (interleukin 7 receptor)
WKKRIKPIVWPSLPDHKKTLEHLCKKPRKVSVFGA

SEQ ID NO: 250 - protein, 230 aa, Artificial Sequence
  Synthetic: IL9R transcript variant 1 NM_002186_2
KLSPRVKRIFYQNVPSPAMFFQPLYSVHNGNFQTWMGAHGAGVLLSQDCAGTPQGALEPCVQEATALLTCGPARPWKSVALEEEQEGPGTRLPGNLSSEDVLPAGCTEWRVQTLAYLPQEDWAPTSLTRPAPPDSEGSRSSSSSSSSNNNNYCALGCYGGWHLSALPGNTQSSGPIPALACGLSCDHQGLETQQGVAWVLAGHCQRPGLHEDLQGMLLPSVLSKARSWTF

SEQ ID NO: 251 - protein, 322 aa, Artificial Sequence
  Synthetic: IL10RA transcript variant 1 NM_001558_3
QLYVRRRKKLPSVLLFKKPSPFIFISQRPSPETQDTIHPLDEEAFLKVSPELKNLDLHGSTDSGFGSTKPSLQTEEPQFLLPDPHPQADRTLGNREPPVLGDSCSSGSSNSTDSGICLQEPSLSPSTGPTWEQQVGSNSRGQDDSGIDLVQNSEGRAGDTQGGSALGHHSPPEPEVPGEEDPAAVAFQGYLRQTRCAEEKATKTGCLEEESPLTDGLGPKFGRCLVDEAGLHPPALAKGYLKQDPLEMTLASSGAPTGQWNQPTEEWSLLALSSCSDLGISDWSFAHDLAPLGCVAAPGGLLGSFNSDLVTLPLISSLQSSE

SEQ ID NO: 252 - protein, 83 aa, Artificial Sequence
  Synthetic: IL10RB NM_000628_4
ALLWCVYKKTKYAFSPRNSLPQHLKEFLGHPHHNTLLFFSFPLSDENDVFDKLSVIAEDSESGKQNPGDSCSLGTPPGQGPQS

SEQ ID NO: 253 - protein, 31 aa, Artificial Sequence
  Synthetic: IL11RA NM_001142784_2
RLRRGGKDGSPKPGFLASVIPVDRRPGAPNL

SEQ ID NO: 254 - protein, 92 aa, Artificial Sequence
  Synthetic: IL12RB1 transcript variant 1 and 4 NM_005535_2
NRAARHLCPPLPTPCASSAIEFPGGKETWQWINPVDFQEEASLQEALVVEMSWDKGERTEPLEKTELPEGAPELALDTELSLEDGDRCKAKM

SEQ ID NO: 255 - protein, 90 aa, Artificial Sequence
  Synthetic: IL12RB1 transcript variant 3 NM_001290023_1
NRAARHLCPPLPTPCASSAIEFPGGKETWQWINPVDFQEEASLQEALVVEMSWDKGERTEPLEKTELPEGAPELALDTELSLEDGDRCDR

SEQ ID NO: 256 - protein, 219 aa, Artificial Sequence
  Synthetic: IL12RB2 transcript variant 1 and 3 NM_001559_2
HYFQQKVFVLLAALRPQWCSREIPDPANSTCAKKYPIAEEKTQLPLDRLLIDWPTPEDPEPLVISEVLHQVTPVFRHPPCSNWPQREKGIQGHQASEKDMMHSASSPPPPRALQAESRQLVDLYKVLESRGSDPKPENPACPWTVLPAGDLPTHDGYLPSNIDDLPSHEAPLADSLEELEPQHISLSVFPSSSLHPLTFSCGDKLTLDQLKMRCDSLML

SEQ ID NO: 257 - protein, 60 aa, Artificial Sequence
  Synthetic: IL13RA1 NM_001560_2
KRLKIIIFPPIPDPGKIFKEMFGDQNDDTLHWKKYDIYEKQTKEETDSVVLIENLKKASQ

SEQ ID NO: 258 - protein, 17 aa, Artificial Sequence
  Synthetic: IL13RA2 NM_000640_2
RKPNTYPKMIPEFFCDT

SEQ ID NO: 259 - protein, 39 aa, Artificial Sequence
  Synthetic: IL15RA transcript variant 4 NM_001256765_1
KSRQTPPLASVEMEAMEALPVTWGTSSRDEDLENCSHHL

SEQ ID NO: 260 - protein, 525 aa, Artificial Sequence
  Synthetic: IL17RA NM_014339_6
CMTWRLAGPGSEKYSDDTKYTDGLPAADLIPPPLKPRKVWIIYSADHPLYVDVVLKFAQFLLTACGTEVALDLLEEQAISEAGVMTWVGRQKQEMVESNSKIIVLCSRGTRAKWQALLGRGAPVRLRCDHGKPVGDLFTAAMNMILPDFKRPACFGTYVVCYFSEVSCDGDVPDLFGAAPRYPLMDRFEEVYFRIQDLEMFQPGRMHRVGELSGDNYLRSPGGRQLRAALDRFRDWQVRCPDWFECENLYSADDQDAPSLDEEVFEEPLLPPGTGIVKRAPLVREPGSQACLAIDPLVGEEGGAAVAKLEPHLQPRGQPAPQPLHTLVLAAEEGALVAAVEPGPLADGAAVRLALAGEGEACPLLGSPGAGRNSVLFLPVDPEDSPLGSSTPMASPDLLPEDVREHLEGLMLSLFEQSLSCQAQGGCSRPAMVLTDPHTPYEEEQRQSVQSDQGYISRSSPQPPEGLTEMEEEEEEEQDPGKPALPLSPEDLESLRSLQRQLLFRQLQKNSGWDTMGSESEGPSA

SEQ ID NO: 261 - protein, 189 aa, Artificial Sequence
  Synthetic: IL17RB NM_018725_3
RHERIKKTSFSTTTLLPPIKVLVVYPSEICFHHTICYFTEFLQNHCRSEVILEKWQKKKIAEMGPVQWLATQKKAADKVVFLLSNDVNSVCDGTCGKSEGSPSENSQDLFPLAFNLFCSDLRSQIHLHKYVVVYFREIDTKDDYNALSVCPKYHLMKDATAFCAELLHVKQQVSAGKRSQACHDGCCSL

SEQ ID NO: 262 - protein, 232 aa, Artificial Sequence
  Synthetic: IL17RC transcript variant 1 NM_153460_3
KKDHAKGWLRLLKQDVRSGAAARGRAALLLYSADDSGFERLVGALASALCQLPLRVAVDLWSRRELSAQGPVAWFHAQRRQTLQEGGVVVLLFSPGAVALCSEWLQDGVSGPGAHGPHDAFRASLSCVLPDFLQGRAPGSYVGACFDRLLHPDAVPALFRTVPVFTLPSQLPDFLGALQQPRAPRSGRLQERAEQVSRALQPALDSYFHPPGTPAPGRGVGPGAGPGAGDGT

SEQ ID NO: 263 - protein, 219 aa, Artificial Sequence
  Synthetic: IL17RC transcript variant 4 NM_001203263_1
KKDHAKAAARGRAALLLYSADDSGFERLVGALASALCQLPLRVAVDLWSRRELSAQGPVAWFHAQRRQTLQEGGVVVLLFSPGAVALCSEWLQDGVSGPGAHGPHDAFRASLSCVLPDFLQGRAPGSYVGACFDRLLHPDAVPALFRTVPVFTLPSQLPDFLGALQQPRAPRSGRLQERAEQVSRALQPALDSYFHPPGTPAPGRGVGPGAGPGAGDGT

SEQ ID NO: 264 - protein, 419 aa, Artificial Sequence
  Synthetic: IL17RD transcript variant 2 NM_017563_4
CRKKQQENIYSHLDEESSESSTYTAALPRERLRPRPKVFLCYSSKDGQNHMNVVQCFAYFLQDFCGCEVALDLWEDFSLCREGQREWVIQKIHESQFIIVVCSKGMKYFVDKKNYKHKGGGRGSGKGELFLVAVSAIAEKLRQAKQSSSAALSKFIAVYFDYSCEGDVPGILDLSTKYRLMDNLPQLCSHLHSRDHGLQEPGQHTRQGSRRNYFRSKSGRSLYVAICNMHQFIDEEPDWFEKQFVPFHPPPLRYREPVLEKFDSGLVLNDVMCKPGPESDFCLKVEAAVLGATGPADSQHESQHGGLDQDGEARPALDGSAALQPLLHTVKAGSPSDMPRDSGIYDSSVPSSELSLPLMEGLSTDQTETSSLTESVSSSSGLGEEEPPALPSKLLSSGSCKADLGCRSYTDELHAVAPL

SEQ ID NO: 265 - protein, 192 aa, Artificial Sequence
  Synthetic: IL17RE transcript variant 1 NM_153480_1
TCRRPQSGPGPARPVLLLHAADSEAQRRLVGALAELLRAALGGGRDVIVDLWEGRHVARVGPLPWLWAARTRVAREQGTVLLLWSGADLRPVSGPDPRAAPLLALLHAAPRPLLLLAYFSRLCAKGDIPPPLRALPRYRLLRDLPRLLRALDARPFAEATSWGRLGARQRRQSRLELCSRLEREAARLADLG

SEQ ID NO: 266 - protein, 191 aa, Artificial Sequence
  Synthetic: IL18R1 transcript variant 1 NM_003855_3
YRVDLVLFYRHLTRRDETLTDGKTYDAFVSYLKECRPENGEEHTFAVEILPRVLEKHFGYKLCIFERDVVPGGAVVDEIHSLIEKSRRLIIVLSKSYMSNEVRYELESGLHEALVERKIKIILIEFTPVTDFTFLPQSLKLLKSHRVLKWKADKSLSYNSRFWKNLLYLMPAKTVKPGRDEPEVLPVLSES

SEQ ID NO: 267 - protein, 222 aa, Artificial Sequence
  Synthetic: IL18RAP NM_003853_3
SALLYRHWIEIVLLYRTYQSKDQTLGDKKDFDAFVSYAKWSSFPSEATSSLSEEHLALSLFPDVLENKYGYSLCLLERDVAPGGVYAEDIVSIIKRSRRGIFILSPNYVNGPSIFELQAAVNLALDDQTLKLILIKFCYFQEPESLPHLVKKALRVLPTVTWRGLKSVPPNSRFWAKMRYHMPVKNSQGFTWNQLRITSRIFQWKGLSRTETTGRSSQPKEW

SEQ ID NO: 268 - protein, 282 aa, Artificial Sequence
  Synthetic: IL20RA transcript variant 1 NM_014432_3
SIYRYIHVGKEKHPANLILIYGNEFDKRFFVPAEKIVINFITLNISDDSKISHQDMSLLGKSSDVSSLNDPQPSGNLRPPQEEEEVKHLGYASHLMEIFCDSEENTEGTSLTQQESLSRTIPPDKTVIEYEYDVRTTDICAGPEEQELSLQEEVSTQGTLLESQAALAVLGPQTLQYSYTPQLQDLDPLAQEHTDSEEGPEEEPSTTLVDWDPQTGRLCIPSLSSFDQDSEGCEPSEGDGLGEEGLLSRLYEEPAPDRPPGENETYLMQFMEEWGLYVQMEN

SEQ ID NO: 269 - protein, 57 aa, Artificial Sequence
  Synthetic: IL20RB NM_144717_3
WKMGRLLQYSCCPVVVLPDTLKITNSPQKLISCRREEVDACATAVMSPEELLRAWIS

SEQ ID NO: 270 - protein, 285 aa, Artificial Sequence
  Synthetic: IL21R transcript variant 2 NM_181078_2
SLKTHPLWRLWKKIWAVPSPERFFMPLYKGCSGDFKKWVGAPFTGSSLELGPWSPEVPSTLEVYSCHPPRSPAKRLQLTELQEPAELVESDGVPKPSFWPTAQNSGGSAYSEERDRPYGLVSIDTVTVLDAEGPCTWPCSCEDDGYPALDLDAGLEPSPGLEDPLLDAGTTVLSCGCVSAGSPGLGGPLGSLLDRLKPPLADGEDWAGGLPWGGRSPGGVSESEAGSPLAGLDMDTFDSGFVGSDCSSPVECDFTSPGDEGPPRSYLRQWVVIPPPLSSPGPQAS

SEQ ID NO: 271 - protein, 325 aa, Artificial Sequence
  Synthetic: IL22RA1 NM_021258_3
SYRYVTKPPAPPNSLNVQRVLTFQPLRFIQEHVLIPVFDLSGPSSLAQPVQYSQIRVSGPREPAGAPQRHSLSEITYLGQPDISILQPSNVPPPQILSPLSYAPNAAPEVGPPSYAPQVTPEAQFPFYAPQAISKVQPSSYAPQATPDSWPPSYGVCMEGSGKDSPTGTLSSPKHLRPKGQLQKEPPAGSCMLGGLSLQEVTSLAMEESQEAKSLHQPLGICTDRTSDPNVLHSGEEGTPQYLKGQLPLLSSVQIEGHPMSLPLQPPSRPCSPSDQGPSPWGLLESLVCPKDEAKSPAPETSDLEQPTELDSLFRGLALTVQWES

SEQ ID NO: 272 - protein, 253 aa, Artificial Sequence
  Synthetic: IL23R NM_144701_2
NRSFRTGIKRRILLLIPKWLYEDIPNMKNSNVVKMLQENSELMNNNSSEQVLYVDPMITEIKEIFIPEHKPTDYKKENTGPLETRDYPQNSLFDNTTVVYIPDLNTGYKPQISNFLPEGSHLSNNNEITSLTLKPPVDSLDSGNNPRLQKHPNFAFSVSSVNSLSNTIFLGELSLILNQGECSSPDIQNSVEEETTMLLENDSPSETIPEQTLLPDEFVSCLGIVNEELPSINTYFPQNILESHFNRISLLEK

SEQ ID NO: 273 - protein, 99 aa, Artificial Sequence
  Synthetic: IL27RA NM_004843_3
TSGRCYHLRHKVLPRWVWEKVPDPANSSSGQPHMEQVPEAQPLGDLPILEVEEMEPPPVMESSQPAQATAPLDSGYEKHFLPTPEELGLLGPPRPQVLA

SEQ ID NO: 274 - protein, 86 aa, Artificial Sequence
  Synthetic: IL27RA NM_004843_3
TSWVWEKVPDPANSSSGQPHMEQVPEAQPLGDLPILEVEEMEPPPVMESSQPAQATAPLDSGYEKHFLPTPEELGLLGPPRPQVLA

SEQ ID NO: 275 - protein, 189 aa, Artificial Sequence
  Synthetic: IL31RA transcript variant 1 NM_139017_5
KKPNKLTHLCWPTVPNPAESSIATWHGDDFKDKLNLKESDDSVNTEDRILKPCSTPSDKLVIDKLVVNFGNVLQEIFTDEARTGQENNLGGEKNGYVTCPFRPDCPLGKSFEELPVSPEIPPRKSQYLRSRMPEGTRPEAKEQLLFSGQSLVPDHLCEEGAPNPYLKNSVTAREFLVSEKLPEHTKGEV

SEQ ID NO: 276 - protein, 106 aa, Artificial Sequence
  Synthetic: IL31RA transcript variant 4 NM_001242638_1
KKPNKLTHLCWPTVPNPAESSIATWHGDDFKDKLNLKESDDSVNTEDRILKPCSTPSDKLVIDKLVVNFGNVLQEIFTDEARTGQENNLGGEKNGTRILSSCPTSI

SEQ ID NO: 277 - protein, 303 aa, Artificial Sequence
  Synthetic: LEPR transcript variant 1 NM_002303_5
SHQRMKKLFWEDVPNPKNCSWAQGLNFQKPETFEHLFIKHTASVTCGPLLLEPETISEDISVDTSWKNKDEMMPTTVVSLLSTTDLEKGSVCISDQFNSVNFSEAEGTEVTYEDESQRQPFVKYATLISNSKPSETGEEQGLINSSVTKCFSSKNSPLKDSFSNSSWEIEAQAFFILSDQHPNIISPHLTFSEGLDELLKLEGNFPEENNDKKSIYYLGVTSIKKRESGVLLTDKSRVSCPFPAPCLFTDIRVLQDSCSHFVENNINLGTSSKKTFASYMPQFQTCSTQTHKIMENKMCDLTV

SEQ ID NO: 278 - protein, 96 aa, Artificial Sequence
  Synthetic: LEPR transcript variant 2 NM_001003680_3
SHQRMKKLFWEDVPNPKNCSWAQGLNFQKMLEGSMFVKSHHHSLISSTQGHKHCGRPQGPLHRKTRDLCSLVYLLTLPPLLSYDPAKSPSVRNTQE

SEQ ID NO: 279 - protein, 34 aa, Artificial Sequence
  Synthetic: LEPR transcript variant 3 NM_001003679_3
SHQRMKKLFWEDVPNPKNCSWAQGLNFQKRTDIL

SEQ ID NO: 280 - protein, 44 aa, Artificial Sequence
  Synthetic: LEPR transcript variant 5 NM_001198688_1
SHQRMKKLFWEDVPNPKNCSWAQGLNFQKKMPGTKELLGGGWLT

SEQ ID NO: 281 - protein, 239 aa, Artificial Sequence
  Synthetic: LIFR NM_001127671_1
YRKREWIKETFYPDIPNPENCKALQFQKSVCEGSSALKTLEMNPCTPNNVEVLETRSAFPKIEDTEIISPVAERPEDRSDAEPENHVVVSYCPPIIEEEIPNPAADEAGGTAQVIYIDVQSMYQPQAKPEEEQENDPVGGAGYKPQMHLPINSTVEDIAAEEDLDKTAGYRPQANVNTWNLVSPDSPRSIDSNSEIVSFGSPCSINSRQFLIPPKDEDSPKSNGGGWSFTNFFQNKPND

SEQ ID NO: 282 - protein, 202 aa, Artificial Sequence
  Synthetic: LMP1 NC_007605_1
YYHGQRHSDEHHHDDSLPHPQQATDDSGHESDSNSNEGRHHLLVSGAGDGPPLCSQNLGAPGGGPDNGPQDPDNTDDNGPQDPDNTDDNGPHDPLPQDPDNTDDNGPQDPDNTDDNGPHDPLPHSPSDSAGNDGGPPQLTEEVENKGGDQGPPLMTDGGGGHSHDSGHGGGDPHLPTLLLGSSGSGGDDDDPHGPVQLSYYD

SEQ ID NO: 283 - protein, 122 aa, Artificial Sequence
  Synthetic: MPL NM_005373_2
RWQFPAHYRRLRHALWPSLPDLHRVLGQYLRDTAALSPPKATVSDTCEEVEPSLLEILPKSSERTPLPLCSSQAQMDYRRLQPSCLGTMPLSVCPPMAESGSCCTTHIANHSYLPLSYWQQP

SEQ ID NO: 284 - protein, 304 aa, Artificial Sequence
  Synthetic: MYD88 transcript variant 1 NM_001172567_1
MAAGGPGAGSAAPVSSTSSLPLAALNMRVRRRLSLFLNVRTQVAADWTALAEEMDFEYLEIRQLETQADPTGRLLDAWQGRPGASVGRLLELLTKLGRDDVLLELGPSIEEDCQKYILKQQQEEAEKPLQVAAVDSSVPRTAELAGITTLDDPLGHMPERFDAFICYCPSDIQFVQEMIRQLEQTNYRLKLCVSDRDVLPGTCVWSIASELIEKRLARRPRGGCRRMVVVVSDDYLQSKECDFQTKFALSLSPGAHQKRLIPIKYKAMKKEFPSILRFITVCDYTNPCTKSWFWTRLAKALSLP

SEQ ID NO: 285 - protein, 296 aa, Artificial Sequence
  Synthetic: MYD88 transcript variant 2 NM_002468_4
MAAGGPGAGSAAPVSSTSSLPLAALNMRVRRRLSLFLNVRTQVAADWTALAEEMDFEYLEIRQLETQADPTGRLLDAWQGRPGASVGRLLELLTKLGRDDVLLELGPSIEEDCQKYILKQQQEEAEKPLQVAAVDSSVPRTAELAGITTLDDPLGHMPERFDAFICYCPSDIQFVQEMIRQLEQTNYRLKLCVSDRDVLPGTCVWSIASELIEKRCRRMVVVVSDDYLQSKECDFQTKFALSLSPGAHQKRLIPIKYKAMKKEFPSILRFITVCDYTNPCTKSWFWTRLAKALSLP

SEQ ID NO: 286 - protein, 251 aa, Artificial Sequence
  Synthetic: MYD88 transcript variant 3 NM_001172568_1
MAAGGPGAGSAAPVSSTSSLPLAALNMRVRRRLSLFLNVRTQVAADWTALAEEMDFEYLEIRQLETQADPTGRLLDAWQGRPGASVGRLLELLTKLGRDDVLLELGPSIGHMPERFDAFICYCPSDIQFVQEMIRQLEQTNYRLKLCVSDRDVLPGTCVWSIASELIEKRCRRMVVVVSDDYLQSKECDFQTKFALSLSPGAHQKRLIPIKYKAMKKEFPSILRFITVCDYTNPCTKSWFWTRLAKALSLP

SEQ ID NO: 287 - protein, 191 aa, Artificial Sequence
  Synthetic: MYD88 transcript variant 4 NM_001172569_1
MAAGGPGAGSAAPVSSTSSLPLAALNMRVRRRLSLFLNVRTQVAADWTALAEEMDFEYLEIRQLETQADPTGRLLDAWQGRPGASVGRLLELLTKLGRDDVLLELGPSIEEDCQKYILKQQQEEAEKPLQVAAVDSSVPRTAELAGITTLDDPLGAAGWWWLSLMITCRARNVTSRPNLHSASLQVPIRSD

SEQ ID NO: 288 - protein, 146 aa, Artificial Sequence
  Synthetic: MYD88 transcript variant 5 NM_001172566_1
MAAGGPGAGSAAPVSSTSSLPLAALNMRVRRRLSLFLNVRTQVAADWTALAEEMDFEYLEIRQLETQADPTGRLLDAWQGRPGASVGRLLELLTKLGRDDVLLELGPSIGAAGWWWLSLMITCRARNVTSRPNLHSASLQVPIRSD

SEQ ID NO: 289 - protein, 172 aa, Artificial Sequence
  Synthetic: MYD88 transcript variant 1 NM_001172567_1
MAAGGPGAGSAAPVSSTSSLPLAALNMRVRRRLSLFLNVRTQVAADWTALAEEMDFEYLEIRQLETQADPTGRLLDAWQGRPGASVGRLLELLTKLGRDDVLLELGPSIEEDCQKYILKQQQEEAEKPLQVAAVDSSVPRTAELAGITTLDDPLGHMPERFDAFICYCPSDI

SEQ ID NO: 290 - protein, 127 aa, Artificial Sequence
  Synthetic: MYD88 transcript variant 3 NM_001172568_1
MAAGGPGAGSAAPVSSTSSLPLAALNMRVRRRLSLFLNVRTQVAADWTALAEEMDFEYLEIRQLETQADPTGRLLDAWQGRPGASVGRLLELLTKLGRDDVLLELGPSIGHMPERFDAFICYCPSDI

SEQ ID NO: 291 - protein, 304 aa, Artificial Sequence
  Synthetic: MYD88 transcript variant 1 NM_001172567_1
MAAGGPGAGSAAPVSSTSSLPLAALNMRVRRRLSLFLNVRTQVAADWTALAEEMDFEYLEIRQLETQADPTGRLLDAWQGRPGASVGRLLELLTKLGRDDVLLELGPSIEEDCQKYILKQQQEEAEKPLQVAAVDSSVPRTAELAGITTLDDPLGHMPERFDAFICYCPSDIQFVQEMIRQLEQTNYRLKLCVSDRDVLPGTCVWSIASELIEKRLARRPRGGCRRMVVVVSDDYLQSKECDFQTKFALSLSPGAHQKRPIPIKYKAMKKEFPSILRFITVCDYTNPCTKSWFWTRLAKALSLP

SEQ ID NO: 292 - protein, 296 aa, Artificial Sequence
  Synthetic: MYD88 transcript variant 2 NM_002468_4
MAAGGPGAGSAAPVSSTSSLPLAALNMRVRRRLSLFLNVRTQVAADWTALAEEMDFEYLEIRQLETQADPTGRLLDAWQGRPGASVGRLLELLTKLGRDDVLLELGPSIEEDCQKYILKQQQEEAEKPLQVAAVDSSVPRTAELAGITTLDDPLGHMPERFDAFICYCPSDIQFVQEMIRQLEQTNYRLKLCVSDRDVLPGTCVWSIASELIEKRCRRMVVVVSDDYLQSKECDFQTKFALSLSPGAHQKRPIPIKYKAMKKEFPSILRFITVCDYTNPCTKSWFWTRLAKALSLP

SEQ ID NO: 293 - protein, 251 aa, Artificial Sequence
  Synthetic: MYD88 transcript variant 3 NM_001172568_1
MAAGGPGAGSAAPVSSTSSLPLAALNMRVRRRLSLFLNVRTQVAADWTALAEEMDFEYLEIRQLETQADPTGRLLDAWQGRPGASVGRLLELLTKLGRDDVLLELGPSIGHMPERFDAFICYCPSDIQFVQEMIRQLEQTNYRLKLCVSDRDVLPGTCVWSIASELIEKRCRRMVVVVSDDYLQSKECDFQTKFALSLSPGAHQKRPIPIKYKAMKKEFPSILRFITVCDYTNPCTKSWFWTRLAKALSLP

SEQ ID NO: 294 - protein, 218 aa, Artificial Sequence
  Synthetic: OSMR transcript variant 4 NM_001323505_1
KSQWIKETCYPDIPDPYKSSILSLIKFKENPHLIIMNVSDCIPDAIEVVSKPEGTKIQFLGTRKSLTETELTKPNYLYLLPTEKNHSGPGPCICFENLTYNQAASDSGSCGHVPVSPKAPSMLGLMTSPENVLKALEKNYMNSLGEIPAGETSLNYVSQLASPMFGDKDSLPTNPVEAPHCSEYKMQMAVSLRLALPPPTENSSLSSITLLDPGEHYC

SEQ ID NO: 295 - protein, 364 aa, Artificial Sequence
  Synthetic: PRLR transcript variant 1 NM_000949_6
KGYSMVTCIFPPVPGPKIKGFDAHLLEKGKSEELLSALGCQDFPPTSDYEDLLVEYLEVDDSEDQHLMSVHSKEHPSQGMKPTYLDPDTDSGRGSCDSPSLLSEKCEEPQANPSTFYDPEVIEKPENPETTHTWDPQCISMEGKIPYFHAGGSKCSTWPLPQPSQHNPRSSYHNITDVCELAVGPAGAPATLLNEAGKDALKSSQTIKSREEGKATQQREVESFHSETDQDTPWLLPQEKTPFGSAKPLDYVEIHKVNKDGALSLLPKQRENSGKPKKPGTPENNKEYAKVSGVMDNNILVLVPDPHAKNVACFEESAKEAPPSLEQNQAEKALANFTATSSKCRLQLGGLDYLDPACFTHSFH

SEQ ID NO: 296 - protein, 42 aa, Artificial Sequence
  Synthetic: TNFRSF4 NM_003327_3
ALYLLRRDQRLPPDAHKPPGGGSFRTPIQEEQADAHSTLAKI

SEQ ID NO: 297 - protein, 188 aa, Artificial Sequence
  Synthetic: TNFRSF8 transcript variant 1 NM_001243_4
HRRACRKRIRQKLHLCYPVQTSQPKLELVDSRPRRSSTQLRSGASVTEPVAEERGLMSQPLMETCHSVGAAYLESLPLQDASPAGGPSSPRDLPEPRVSTEHTNNKIEKIYIMKADTVIVGTVKAELPEGRGLAGPAEPELEEELEADHTPHYPEQETEPPLGSCSDVMLSVEEEGKEDPLPTAASGK

SEQ ID NO: 298 - protein, 42 aa, Artificial Sequence; identical to SEQ ID NO: 53
  Synthetic: TNFRSF9 NM_001561_5

SEQ ID NO: 299 - protein, 60 aa, Artificial Sequence; identical to SEQ ID NO: 62
  Synthetic: TNFRSF14 transcript variant 1 NM_003820_3

SEQ ID NO: 300 - protein, 58 aa, Artificial Sequence
  Synthetic: TNFRSF18 transcript variant 1 NM_004195_2
QLGLHIWQLRSQCMWPRETQLLLEVPPSTEDARSCQFPEEERGERSAEEKGRLGDLWV

SEQ ID NO: 301 - protein, 51 aa, Artificial Sequence
  Synthetic: TNFRSF18 transcript variant 3_NM_148902_1
QLGLHIWQLRKTQLLLEVPPSTEDARSCQFPEEERGERSAEEKGRLGDLWV

SEQ ID NO: 302 - protein, 23 aa, Artificial Sequence
  Synthetic: Linker
GSGGSEGGGSEGGAATAGSGSGS

SEQ ID NO: 303 - protein, 5 aa, Artificial Sequence
  Synthetic: TRAF1, TRAF2, and TRAF3 consensus binding sequence
  misc_feature (2)..(2): Xaa can be any naturally occurring amino acid
  misc_feature (4)..(4): Xaa can be any naturally occurring amino acid
PXQXT

SEQ ID NO: 304 - protein, 4 aa, Artificial Sequence
  Synthetic: TRAF2 consensus binding sequence
  misc_feature (2)..(3): Xaa can be any naturally occurring amino acid
SXXE

SEQ ID NO: 305 - protein, 6 aa, Artificial Sequence
  Synthetic: TRAF6 consensus binding sequence
  misc_feature (2)..(2): Xaa can be any naturally occurring amino acid
  misc_feature (4)..(4): Xaa can be any naturally occurring amino acid
  misc_feature (6)..(6): Xaa can be any naturally occurring amino acid
QXPXEX

SEQ ID NO: 306 - protein, 4 aa, Artificial Sequence
  Synthetic: Box1 motif
  misc_feature (2)..(3): Xaa can be any naturally occurring amino acid
PXXP

SEQ ID NO: 307 - protein, 4 aa, Artificial Sequence
  Synthetic: Shc phosphotyrosine-binding binding motif
  misc_feature (2)..(3): Xaa can be any naturally occurring amino acid
NXXY

SEQ ID NO: 308 - protein, 4 aa, Artificial Sequence
  Synthetic: STAT3 consensus binding sequence
  misc_feature (2)..(3): Xaa can be any naturally occurring amino acid
YXXQ

SEQ ID NO: 309 - protein, 4 aa, Artificial Sequence
  Synthetic: STAT5 recruitment sequence
YLPL

SEQ ID NO: 310 - protein, 4 aa, Artificial Sequence
  Synthetic: STAT5 consensus recruitment sequence
  misc_feature (1)..(1): Xaa is phosphorylated tyrosine
  misc_feature (3)..(3): Xaa can be any naturally occurring amino acid
XLXL

SEQ ID NO: 311 - protein, 570 aa, Influenza virus
  misc_feature (1)..(570): Influenze A HA from H1N1
MKANLLVLLCALAAADADTICIGYHANNSTDTVDTVLEKNVTVTHSVNLLEDSHNGKLCRLKGIAPLQLGKCNIAGWLLGNPECDPLLPVRSWSYIVETPNSENGICYPGDFIDYEELREQLSSVSSFERFEIFPKESSWPNHNTNGVTAACSHEGKSSFYRNLLWLTEKEGSYPKLKNSYVNKKGKEVLVLWGIHHPPNSKEQQNLYQNENAYVSVVTSNYNRRFTPEIAERPKVRDQAGRMNYYWTLLKPGDTIIFEANGNLIAPMYAFALSRGFGSGIITSNASMHECNTKCQTPLGAINSSLPYQNIHPVTIGECPKYVRSAKLRMVTGLRNIPSIQSRRRKKRGLFGAIAGFIEGGWTGMIDGWYGYHHQNEQGSGYAADQKSTQNAINGITNKVNTVIEKMNIQFTAVGKEFNKLEKRMENLNKKVDDGFLDIWTYNAELLVLLENERTLDFHDSNVKNLYEKVKSQLKNNAKEIGNGCFEFYHKCDNECMESVRNGTYDYPKYSEESKLNREKVDGVKLESMGIYQILAIYSTVASSLVLLVSLGAISFWMCSNGSLQCRICI

SEQ ID NO: 312 - protein, 470 aa, Influenza virus
  misc_feature (1)..(470): Influenze A NA from H10N7
MNPNQKLFALSGVAIALSILNLLIGISNVGLNVSLHLKGSSDQDKNWTCTSVTQNNTTLIENTYVNNTTVINKGTGTTKQNYLMLNKSLCKVEGWVVVAKDNAIRFGESEQIIVTREPYVSCDPLGCKMYALHQGTTIRNKHSNGTIHDRTAFRGLISTPLGSPPVVSNSDFLCVGWSSTSCHDGIGRMTICVQGNNNNATATVYYDRRLTTTIKTWAGNILRTQESECVCHNGTCVVIMTDGSASSQAHTKVLYFHKGLVIKEEALKGSARHIEECSCYGHNSKVTCVCRDNWQGANRPVIEIDMNAMEHTSQYLCTGVLTDTSRPSDKSMGDCNNPITGSPGAPGVKGFGFLDSDNTWLGRTISPRSRSGFEMLKIPNAGTDPNSRITERQEIVDNNNWSGYSGSFIDYWDESSVCYNPCFYVELIRGRPEEAKYVWWTSNSLVALCGSPISVGSGSFPDGAQIQYFS

SEQ ID NO: 313 - protein, 523 aa, Artificial Sequence
  Synthetic: MV(ed)-F-delta-30
MSIMGLKVNVSAIFMAVLLTLQTPTGQIHWGNLSKIGVVGIGSASYKVMTRSSHQSLVIKLMPNITLLNNCTRVEIAEYRRLLRTVLEPIRDALNAMTQNIRPVQSVASSRRHKRFAGVVLAGAALGVATAAQITAGIALHQSMLNSQAIDNLRASLETTNQAIEAIRQAGQEMILAVQGVQDYINNELIPSMNQLSCDLIGQKLGLKLLRYYTEILSLFGPSLRDPISAEISIQALSYALGGDINKVLEKLGYSGGDLLGILESRGIKARITHVDTESYFIVLSIAYPTLSEIKGVIVHRLEGVSYNIGSQEWYTTVPKYVATQGYLISNFDESSCTFMPEGTVCSQNALYPMSPLLQECLRGSTKSCARTLVSGSFGNRFILSQGNLIANCASILCKCYTTGTIINQDPDKILTYIAADHCPVVEVNGVTIQVGSRRYPDAVYLHRIDLGPPISLERLDVGTNLGNAIAKLEDAKELLESSDQILRSMKGLSSTSIVYILIAVCLGGLIGIPALICCCRGR

SEQ ID NO: 314 - protein, 599 aa, Artificial Sequence
  Synthetic: MV(ed)-H-delta-18
MGSRIVINREHLMIDRPYVLLAVLFVMSLSLIGLLAIAGIRLHRAAIYTAEIHKSLSTNLDVTNSIEHQVKDVLTPLFKIIGDEVGLRTPQRFTDLVKFISDKIKFLNPDREYDFRDLTWCINPPERIKLDYDQYCADVAAEELMNALVNSTLLETRTTNQFLAVSKGNCSGPTTIRGQFSNMSLSLLDLYLSRGYNVSSIVTMTSQGMYGGTYLVEKPNLSSKRSELSQLSMYRVFEVGVIRNPGLGAPVFHMTNYLEQPVSNDLSNCMVALGELKLAALCHGEDSITIPYQGSGKGVSFQLVKLGVWKSPTDMQSWVPLSTDDPVIDRLYLSSHRGVIADNQAKWAVPTTRTDDKLRMETCFQQACKGKIQALCENPEWAPLKDNRIPSYGVLSVDLSLTVELKIKIASGFGPLITHGSGMDLYKSNHNNVYWLTIPPMKNLALGVINTLEWIPRFKVSPNLFTVPIKEAGEDCHAPTYLPAEVDGDVKLSSNLVILPGQDLQYVLATYDTSRVEHAVVYYVYSPGRSFSYFYPFRLPIKGVPIELQVECFTWDQKLWCRHFCVLADSESGGHITHSGMVGMGVSCTVTREDGTNRR

SEQ ID NO: 315 - protein, 593 aa, Artificial Sequence
  Synthetic: MV(ed)-H-delta-24
MNREHLMIDRPYVLLAVLFVMSLSLIGLLAIAGIRLHRAAIYTAEIHKSLSTNLDVTNSIEHQVKDVLTPLFKIIGDEVGLRTPQRFTDLVKFISDKIKFLNPDREYDFRDLTWCINPPERIKLDYDQYCADVAAEELMNALVNSTLLETRTTNQFLAVSKGNCSGPTTIRGQFSNMSLSLLDLYLSRGYNVSSIVTMTSQGMYGGTYLVEKPNLSSKRSELSQLSMYRVFEVGVIRNPGLGAPVFHMTNYLEQPVSNDLSNCMVALGELKLAALCHGEDSITIPYQGSGKGVSFQLVKLGVWKSPTDMQSWVPLSTDDPVIDRLYLSSHRGVIADNQAKWAVPTTRTDDKLRMETCFQQACKGKIQALCENPEWAPLKDNRIPSYGVLSVDLSLTVELKIKIASGFGPLITHGSGMDLYKSNHNNVYWLTIPPMKNLALGVINTLEWIPRFKVSPNLFTVPIKEAGEDCHAPTYLPAEVDGDVKLSSNLVILPGQDLQYVLATYDTSRVEHAVVYYVYSPGRSFSYFYPFRLPIKGVPIELQVECFTWDQKLWCRHFCVLADSESGGHITHSGMVGMGVSCTVTREDGTNRR

SEQ ID NO: 316 - DNA, 477 bp, Artificial Sequence
  Synthetic: hGH polyA
gggtggcatccctgtgacccctccccagtgcctctcctggccctggaagttgccactccagtgcccaccagccttgtcctaataaaattaagttgcatcattttgtctgactaggtgtccttctataatattatggggtggaggggggtggtatggagcaaggggcaagttgggaagacaacctgtagggcctgcggggtctgttgggaaccaagctggagtgcagtggcacaatcttggctcactgcaatctccgcctcctgggttcaagcgattctcctgcctcagcctcccgagttgttgggattccaggcatgcatgaccaggctcagctaatttttgtttttttggtagagacggggtttcaccatattggccaggctggtctccaactcctaatctcaggtgatctacccaccttggcctcccaaattgctgggattacaggcgtgaaccactgctcccttccctgtcctt

SEQ ID NO: 317 - DNA, 49 bp, Artificial Sequence
  Synthetic: SPA1
aataaaagatctttattttcattagatctgtgtgttggttttttgtgtg

SEQ ID NO: 318 - DNA, 120 bp, Artificial Sequence
  Synthetic: SPA2
aataaaatatctcagagctctagacatctgtgtgttggttttttgtgtgtagtaatgaggatctggagatattgaagtatcttccggacgactaacagctgtcattggcggatcttaata

SEQ ID NO: 319 - DNA, 295 bp, Artificial Sequence
  Synthetic: b-globin polyA spacer B
atctcaagagtggcagcggtcttgagtggcagcggcggtatacggcagcggcatgtaactagctcctcagtggcagcgatgaggaggcaataaaggaaattgattttcattgcaatagtgtgttggaattttttgtgtctctcaaggttctgttaagtaactgaacccaatgtcgttagtgacgcttagctcttaagaggtcactgacctaacaatctcaagagtggcagcggtcttgagtggcagcggcggtatacggcagcgctatctaagtagtaacaagtagcgtggggca

SEQ ID NO: 320 - DNA, 512 bp, Artificial Sequence
  Synthetic: b-globin polyA spacer A
acgcgccctgtagcggcgcattaagcgcggcgggtgtggtggttacgcgcagcgtgaccgctacacttgccagcgccctagcgcccgctcctttcgctttcttcccttcctttctcgccacgttcgccggctttccccgtcaagctctaaatcgggggctccctttagggttccgatttagtgctttacggcacctcgaccccaaaaaacttgattagggtgatggttaataaaggaaattgattttcattgcaatagtgtgttggaattttttgtgtctctcacacgtagtgggccatcgccctgatagacggtttttcgccctttgacgttggagtccacgttcttcgatagtggactcttgttccaaactggaacaacactcaaccctatctcggtctattcttttgatttataagggattttgccgatttcggcctattggttaaaaaatgagctgatttaacaaaaatttaacgcgaattttaacaaaatattaacgcttagaattt

SEQ ID NO: 321 - DNA, 243 bp, Artificial Sequence
  Synthetic: 250 cHS4 insulator v1
gagctcacggggacagcccccccccaaagcccccagggatgtaattacgtccctcccccgctagggggcagcagcgagccgcccggggctccgctccggtccggcgctccccccgcatccccgagccggcagcgtgcggggacagcccgggcacggggaaggtggcacgggatcgctttcctctgaacgcttctcgctgctctttgagcctgcagacacgtggggggatacggggaaaagctt

SEQ ID NO: 322 - DNA, 243 bp, Artificial Sequence
  Synthetic: 250 cHS4 insulator v2
gagctcacggggacagcccccccccaaagcccccagggatgtaattacgtccctcccccgctagggggcagcagcgagccgcccggggctccgctccggtccggcgctccccccgcatccccgagccggcagcgtgcggggacagcccgggcacggggaaggtggcacgggatcgctttcctctgaacgcttctcgctgctctttgagcgtgcagacacgtggggggatacggggaaaagctt

SEQ ID NO: 323 - DNA, 650 bp, Artificial Sequence
  Synthetic: 650 cHS4 insulator
gagctcacggggacagcccccccccaaagcccccagggatgtaattacgtccctcccccgctagggggcagcagcgagccgcccggggctccgctccggtccggcgctccccccgcatccccgagccggcagcgtgcggggacagcccgggcacggggaaggtggcacgggatcgctttcctctgaacgcttctcgctgctctttgagcatgcagacacatggggggatacggggaaaaagctttaggctctgcatgtttgatggtgtatggatgcaagcagaaggggtggaagagcttgcctggagagatacagctgggtcagtaggactgggacaggcagctggagaattgccatgtagatgttcatacaatcgtcaaatcatgaaggctggaaaagccctccaagatccccaagaccaaccccaacccacccagcgtgcccactggccatgtccctcagtgccacatccccacagttcttcatcacctccagggacggtgacccccccacctccgtgggcagctgtgccactgcagcaccgctctttggagaagataaatcttgctaaatccagcccgaccctcccctggcacaacataaggccattatctctcatccaactccaggacggagtcagtgagaatatt

SEQ ID NO: 324 - DNA, 420 bp, Artificial Sequence
  Synthetic: 400 cHS4 insulator
gagctcacggggacagcccccccccaaagcccccagggatgtaattacgtccctcccccgctagggggcagcagcgagccgcccggggctccgctccggtccggcgctccccccgcatccccgagccggcagcgtgcggggacagcccgggcacggggaaggtggcacgggatcgctttcctctgaacgcttctcgctgctctttgagcatgcagacacatggggggatacggggaaaaagctttaggctgaaagagagatttagaatgacagaatcatagaacggcctgggttgcaaaggagcacagtgctcatccagatccaaccccctgctatgtgcagggtcatcaaccagcagcccaggctgcccagagccacatccagcctggccttgaatgcctgcagggatggggcatccac

SEQ ID NO: 325 - DNA, 949 bp, Artificial Sequence
  Synthetic: 650 cHS4 insulator and b-globin polyA spacer B
gagctcacggggacagcccccccccaaagcccccagggatgtaattacgtccctcccccgctagggggcagcagcgagccgcccggggctccgctccggtccggcgctccccccgcatccccgagccggcagcgtgcggggacagcccgggcacggggaaggtggcacgggatcgctttcctctgaacgcttctcgctgctctttgagcatgcagacacatggggggatacggggaaaaagctttaggctctgcatgtttgatggtgtatggatgcaagcagaaggggtggaagagcttgcctggagagatacagctgggtcagtaggactgggacaggcagctggagaattgccatgtagatgttcatacaatcgtcaaatcatgaaggctggaaaagccctccaagatccccaagaccaaccccaacccacccagcgtgcccactggccatgtccctcagtgccacatccccacagttcttcatcacctccagggacggtgacccccccacctccgtgggcagctgtgccactgcagcaccgctctttggagaagataaatcttgctaaatccagcccgaccctcccctggcacaacataaggccattatctctcatccaactccaggacggagtcagtgagaatattgcgatgccccacgctacttgttactacttagatagcgctgccgtataccgccgctgccactcaagaccgctgccactcttgagattgttaggtcagtgacctcttaagagctaagcgtcactaacgacattgggttcagttacttaacagaaccttgagagacacaaaaaattccaacacactattgcaatgaaaatcaatttcctttattgcctcctcatcgctgccactgaggagctagttacatgccgctgccgtataccgccgctgccactcaagaccgctgccactcttgagat

SEQ ID NO: 326 - DNA, 949 bp, Artificial Sequence
  Synthetic: b-globin polyA spacer B and 650 cHS4 insulator
atctcaagagtggcagcggtcttgagtggcagcggcggtatacggcagcggcatgtaactagctcctcagtggcagcgatgaggaggcaataaaggaaattgattttcattgcaatagtgtgttggaattttttgtgtctctcaaggttctgttaagtaactgaacccaatgtcgttagtgacgcttagctcttaagaggtcactgacctaacaatctcaagagtggcagcggtcttgagtggcagcggcggtatacggcagcgctatctaagtagtaacaagtagcgtggggcatcgcgagctcacggggacagcccccccccaaagcccccagggatggtcgtacgtccctcccccgctagggggcagcagcgagccgcccggggctccgctccggtccggcgctccccccgcatccccgagccggcagcgtgcggggacagcccgggcacggggaaggtggcacgggatcgctttcctctgaacgcttctcgctgctctttgagcatgcagacacatggggggatacggggaaaaagctttaggctctgcatgtttgatggtgtatggatgcaagcagaaggggtggaagagcttgcctggagagatacagctgggtcagtaggactgggacaggcagctggagaattgccatgtagatgttcatacaatcgtcaaatcatgaaggctggaaaagccctccaagatccccaagaccaaccccaacccacccagcgtgcccactggccatgtccctcagtgccacatccccacagttcttcatcacctccagggacggtgacccccccacctccgtgggcagctgtgccactgcagcaccgctctttggagaagataaatcttgctaaatccagcccgaccctcccctggcacaacataaggccattatctctcatccaactccaggacggagtcagtgagaatatt

SEQ ID NO: 327 - DNA, 15 bp, Artificial Sequence
  Synthetic: Kozak sequence
  misc_feature (1)..(3): nnn, if present, is GCC
  misc_feature (10)..(10): n is A or G
nnngccgccnccatg

SEQ ID NO: 328 - DNA, 9 bp, Artificial Sequence
  Synthetic: Kozak sequence
  misc_feature (7)..(7): n is T or U
  misc_feature (9)..(9): n, if present, is G
ccaccangn

SEQ ID NO: 329 - DNA, 9 bp, Artificial Sequence
  Synthetic: Kozak-type sequence 2
  misc_feature (7)..(7): n is T or U
  misc_feature (9)..(9): n, if present, is G
ccgccangn

SEQ ID NO: 330 - DNA, 13 bp, Artificial Sequence
  Synthetic: Kozak-type sequence 3
  misc_feature (11)..(11): n is T or U
  misc_feature (13)..(13): n, if present, is G
gccgccgccangn

SEQ ID NO: 331 - DNA, 13 bp, Artificial Sequence
  Synthetic: Kozak sequence
  misc_feature (11)..(11): n is T or U
  misc_feature (13)..(13): n, if present, is G
gccgccaccangn

SEQ ID NO: 332 - RNA, 12 nt, Artificial Sequence
  Synthetic: Kozak sequence
gccgccaccaug

SEQ ID NO: 333 - DNA, 28 bp, Mus musculus
  misc_feature (1)..(28): SIBR (synthetic inhibitory BIC-derived RNA)
ctggaggcttgctgaaggctgtatgctg

SEQ ID NO: 334 - DNA, 45 bp, Mus musculus
  misc_feature (1)..(45): 3 microRNA flanking sequence of miR-155
caggacacaaggcctgttactagcactcacatggaacaaatggcc

SEQ ID NO: 335 - DNA, 19 bp, Artificial Sequence
  Synthetic: synthetic DNA encoding stem
gttttggccactgactgac

SEQ ID NO: 336 - protein, 511 aa, Artificial Sequence
  Synthetic: VSV-G envelope protein
MKCLLYLAFLFIGVNCKFTIVFPHNQKGNWKNVPSNYHYCPSSSDLNWHNDLIGTALQVKMPKSHKAIQADGWMCHASKWVTTCDFRWYGPKYITHSIRSFTPSVEQCKESIEQTKQGTWLNPGFPPQSCGYATVTDAEAVIVQVTPHHVLVDEYTGEWVDSQFINGKCSNYICPTVHNSTTWHSDYKVKGLCDSNLISMDITFFSEDGELSSLGKEGTGFRSNYFAYETGGKACKMQYCKHWGVRLPSGVWFEMADKDLFAAARFPECPEGSSISAPSQTSVDVSLIQDVERILDYSLCQETWSKIRAGLPISPVDLSYLAPKNPGTGPAFTIINGTLKYFETRYIRVDIAAPILSRMVGMISGTTTERELWDDWAPYEDVEIGPNGVLRTSSGYKFPLYMIGHGMLDSDLHLSSKAQVFEHPHIQDAASQLPDDESLFFGDTGLSKNPIELVEGWFSSWKSSIASFFFIIGLIIGLFLVLRVGIHLCIKLKHTKKRQIYTDIEMNRLGK

SEQ ID NO: 337 - protein, 563 aa, Artificial Sequence
  Synthetic: Baboon retroviral envelope glycoprotein
MGFTTKIIFLYNLVLVYAGFDDPRKAIELVQKRYGRPCDCSGGQVSEPPSDRVSQVTCSGKTAYLMPDQRWKCKSIPKDTSPSGPLQECPCNSYQSSVHSSCYTSYQQCRSGNKTYYTATLLKTQTGGTSDVQVLGSTNKLIQSPCNGIKGQSICWSTTAPIHVSDGGGPLDTTRIKSVQRKLEEIHKALYPELQYHPLAIPKVRDNLMVDAQTLNILNATYNLLLMSNTSLVDDCWLCLKLGPPTPLAIPNFLLSYVTRSSDNISCLIIPPLLVQPMQFSNSSCLFSPSYNSTEEIDLGHVAFSNCTSITNVTGPICAVNGSVFLCGNNMAYTYLPTNWTGLCVLATLLPDIDIIPGDEPVPIPAIDHFIYRPKRAIQFIPLLAGLGITAAFTTGATGLGVSVTQYTKLSNQLISDVQILSSTIQDLQDQVDSLAEVVLQNRRGLDLLTAEQGGICLALQEKCCFYVNKSGIVRDKIKTLQEELERRRKDLASNPLWTGLQGLLPYLLPFLGPLLTLLLLLTIGPCIFNRLTAFINDKLNIIHAMVLTQQYQVLRTDEEAQD

SEQ ID NO: 338 - protein, 654 aa, Artificial Sequence
  Synthetic: MuLV envelope protein
MARSTLSKPPQDKINPWKPLIVMGVLLGVGMAESPHQVFNVTWRVTNLMTGRTANATSLLGTVQDAFPKLYFDLCDLVGEEWDPSDQEPYVGYGCKYPAGRQRTRTFDFYVCPGHTVKSGCGGPGEGYCGKWGCETTGQAYWKPTSSWDLISLKRGNTPWDTGCSKVACGPCYDLSKVSNSFQGATRGGRCNPLVLEFTDAGKKANWDGPKSWGLRLYRTGTDPITMFSLTRQVLNVGPRVPIGPNPVLPDQRLPSSPIEIVPAPQPPSPLNTSYPPSTTSTPSTSPTSPSVPQPPPGTGDRLLALVKGAYQALNLTNPDKTQECWLCLVSGPPYYEGVAVVGTYTNHSTAPANCTATSQHKLTLSEVTGQGLCMGAVPKTHQALCNTTQSAGSGSYYLAAPAGTMWACSTGLTPCLSTTVLNLTTDYCVLVELWPRVIYHSPDYMYGQLEQRTKYKREPVSLTLALLLGGLTMGGIAAGIGTGTTALIKTQQFEQLHAAIQTDLNEVEKSITNLEKSLTSLSEVVLQNRRGLDLLFLKEGGLCAALKEECCFYADHTGLVRDSMAKLRERLNQRQKLFETGQGWFEGLFNRSPWFTTLISTIMGPLIVLLLILLFGPCILNRLVQFVKDRISVVQALVLTQQYHQLKPIEYEP

SEQ ID NO: 339 - protein, 545 aa, Artificial Sequence
  Synthetic: Baboon retroviral envelope glycoprotein -delta-R (HA)
MGFTTKIIFLYNLVLVYAGFDDPRKAIELVQKRYGRPCDCSGGQVSEPPSDRVSQVTCSGKTAYLMPDQRWKCKSIPKDTSPSGPLQECPCNSYQSSVHSSCYTSYQQCRSGNKTYYTATLLKTQTGGTSDVQVLGSTNKLIQSPCNGIKGQSICWSTTAPIHVSDGGGPLDTTRIKSVQRKLEEIHKALYPELQYHPLAIPKVRDNLMVDAQTLNILNATYNLLLMSNTSLVDDCWLCLKLGPPTPLAIPNFLLSYVTRSSDNISCLIIPPLLVQPMQFSNSSCLFSPSYNSTEEIDLGHVAFSNCTSITNVTGPICAVNGSVFLCGNNMAYTYLPTNWTGLCVLATLLPDIDIIPGDEPVPIPAIDHFIYRPKRAIQFIPLLAGLGITAAFTTGATGLGVSVTQYTKLSNQLISDVQILSSTIQDLQDQVDSLAEVVLQNRRGLDLLTAEQGGICLALQEKCCFYVNKSGIVRDKIKTLQEELERRRKDLASNPLWTGLQGLLPYLLPFLGPLLTLLLLLTIGPCIFNRLTAFINDKLNIIHA

SEQ ID NO: 340 - protein, 546 aa, Artificial Sequence
  Synthetic: Baboon retroviral envelope glycoprotein -delta-R (HAM)
MGFTTKIIFLYNLVLVYAGFDDPRKAIELVQKRYGRPCDCSGGQVSEPPSDRVSQVTCSGKTAYLMPDQRWKCKSIPKDTSPSGPLQECPCNSYQSSVHSSCYTSYQQCRSGNKTYYTATLLKTQTGGTSDVQVLGSTNKLIQSPCNGIKGQSICWSTTAPIHVSDGGGPLDTTRIKSVQRKLEEIHKALYPELQYHPLAIPKVRDNLMVDAQTLNILNATYNLLLMSNTSLVDDCWLCLKLGPPTPLAIPNFLLSYVTRSSDNISCLIIPPLLVQPMQFSNSSCLFSPSYNSTEEIDLGHVAFSNCTSITNVTGPICAVNGSVFLCGNNMAYTYLPTNWTGLCVLATLLPDIDIIPGDEPVPIPAIDHFIYRPKRAIQFIPLLAGLGITAAFTTGATGLGVSVTQYTKLSNQLISDVQILSSTIQDLQDQVDSLAEVVLQNRRGLDLLTAEQGGICLALQEKCCFYVNKSGIVRDKIKTLQEELERRRKDLASNPLWTGLQGLLPYLLPFLGPLLTLLLLLTIGPCIFNRLTAFINDKLNIIHAM

SEQ ID NO: 341 - protein, 905 aa, Artificial Sequence
  Synthetic: Fusion of anti-CD3 scFV from UCHT1 to MuLV envelope protein
MARSTLSKPPQDKINPWKPLIVMGVLLGVGDIQMTQSPSSLSASVGDRVTITCRASQDIRNYLNWYQQKPGKAPKLLIYYTSRLESGVPSRFSGSGSGTDYTLTISSLQPEDFATYYCQQGNTLPWTFGQGTKVEIKGGGGSGGGGSGGGGSEVQLVESGGGLVQPGGSLRLSCAASGYSFTGYTMNWVRQAPGKGLEWVALINPYKGVSTYNQKFKDRFTISVDKSKNTAYLQMNSLRAEDTAVYYCARSGYYGDSDWYFDVWGQGTLVTVSSAAAIEGRMAESPHQVFNVTWRVTNLMTGRTANATSLLGTVQDAFPKLYFDLCDLVGEEWDPSDQEPYVGYGCKYPAGRQRTRTFDFYVCPGHTVKSGCGGPGEGYCGKWGCETTGQAYWKPTSSWDLISLKRGNTPWDTGCSKVACGPCYDLSKVSNSFQGATRGGRCNPLVLEFTDAGKKANWDGPKSWGLRLYRTGTDPITMFSLTRQVLNVGPRVPIGPNPVLPDQRLPSSPIEIVPAPQPPSPLNTSYPPSTTSTPSTSPTSPSVPQPPPGTGDRLLALVKGAYQALNLTNPDKTQECWLCLVSGPPYYEGVAVVGTYTNHSTAPANCTATSQHKLTLSEVTGQGLCMGAVPKTHQALCNTTQSAGSGSYYLAAPAGTMWACSTGLTPCLSTTVLNLTTDYCVLVELWPRVIYHSPDYMYGQLEQRTKYKREPVSLTLALLLGGLTMGGIAAGIGTGTTALIKTQQFEQLHAAIQTDLNEVEKSITNLEKSLTSLSEVVLQNRRGLDLLFLKEGGLCAALKEECCFYADHTGLVRDSMAKLRERLNQRQKLFETGQGWFEGLFNRSPWFTTLISTIMGPLIVLLLILLFGPCILNRLVQFVKDRISVVQALVLTQQYHQLKPIEYEP

SEQ ID NO: 342 - DNA, 9 bp, Artificial Sequence
  Synthetic: Kozak-type sequence
gccgccacc

SEQ ID NO: 343 - DNA, 9 bp, Artificial Sequence
  Synthetic: triple stop sequence
taatagtga

SEQ ID NO: 344 - DNA, 191 bp, Artificial Sequence
  Synthetic: WPRE
gtcctttccatggctgctcgcctgtgttgccacctggattctgcgcgggacgtccttctgctacgtcccttcggccctcaatccagcggaccttccttcccgcggcctgctgccggctctgcggcctcttccgcgtcttcgccttcgccctcagacgagtcggatctccctttgggccgcctccccgcctg

SEQ ID NO: 345 - protein, 654 aa, Artificial Sequence
  Synthetic: MuLVSUx
MARSTLSKPPQDKINPWKPLIVMGVLLGVGMAESPHQVFNVTWRVTNLMTGRTANATSLLGTVQDAFPKLYFDLCDLVGEEWDPSDQEPYVGYGCKYPAGRQRTRTFDFYVCPGHTVKSGCGGPGEGYCGKWGCETTGQAYWKPTSSWDLISLKRGNTPWDTGCSKVACGPCYDLSKVSNSFQGATRGGRCNPLVLEFTDAGKKANWDGPKSWGLRLYRTGTDPITMFSLTRQVLNVGPRVPIGPNPVLPDQRLPSSPIEIVPAPQPPSPLNTSYPPSTTSTPSTSPTSPSVPQPPPGTGDRLLALVKGAYQALNLTNPDKTQECWLCLVSGPPYYEGVAVVGTYTNHSTAPANCTATSQHKLTLSEVTGQGLCMGAVPKTHQALCNTTQSAGSGSYYLAAPAGTMWACSTGLTPCLSTTVLNLTTDYCVLVELWPRVIYHSPDYMYGQLEQRTIEGREPVSLTLALLLGGLTMGGIAAGIGTGTTALIKTQQFEQLHAAIQTDLNEVEKSITNLEKSLTSLSEVVLQNRRGLDLLFLKEGGLCAALKEECCFYADHTGLVRDSMAKLRERLNQRQKLFETGQGWFEGLFNRSPWFTTLISTIMGPLIVLLLILLFGPCILNRLVQFVKDRISVVQALVLTQQYHQLKPIEYEP

SEQ ID NO: 346 - protein, 905 aa, Artificial Sequence
  Synthetic: UMuLVSUx
MARSTLSKPPQDKINPWKPLIVMGVLLGVGDIQMTQSPSSLSASVGDRVTITCRASQDIRNYLNWYQQKPGKAPKLLIYYTSRLESGVPSRFSGSGSGTDYTLTISSLQPEDFATYYCQQGNTLPWTFGQGTKVEIKGGGGSGGGGSGGGGSEVQLVESGGGLVQPGGSLRLSCAASGYSFTGYTMNWVRQAPGKGLEWVALINPYKGVSTYNQKFKDRFTISVDKSKNTAYLQMNSLRAEDTAVYYCARSGYYGDSDWYFDVWGQGTLVTVSSAAAIEGRMAESPHQVFNVTWRVTNLMTGRTANATSLLGTVQDAFPKLYFDLCDLVGEEWDPSDQEPYVGYGCKYPAGRQRTRTFDFYVCPGHTVKSGCGGPGEGYCGKWGCETTGQAYWKPTSSWDLISLKRGNTPWDTGCSKVACGPCYDLSKVSNSFQGATRGGRCNPLVLEFTDAGKKANWDGPKSWGLRLYRTGTDPITMFSLTRQVLNVGPRVPIGPNPVLPDQRLPSSPIEIVPAPQPPSPLNTSYPPSTTSTPSTSPTSPSVPQPPPGTGDRLLALVKGAYQALNLTNPDKTQECWLCLVSGPPYYEGVAVVGTYTNHSTAPANCTATSQHKLTLSEVTGQGLCMGAVPKTHQALCNTTQSAGSGSYYLAAPAGTMWACSTGLTPCLSTTVLNLTTDYCVLVELWPRVIYHSPDYMYGQLEQRTIEGREPVSLTLALLLGGLTMGGIAAGIGTGTTALIKTQQFEQLHAAIQTDLNEVEKSITNLEKSLTSLSEVVLQNRRGLDLLFLKEGGLCAALKEECCFYADHTGLVRDSMAKLRERLNQRQKLFETGQGWFEGLFNRSPWFTTLISTIMGPLIVLLLILLFGPCILNRLVQFVKDRISVVQALVLTQQYHQLKPIEYEP

SEQ ID NO: 347 - protein, 770 aa, Artificial Sequence
  Synthetic: UCHT1-(G4S)3-VSVG
MKCLLYLAFLFIGVNCDIQMTQSPSSLSASVGDRVTITCRASQDIRNYLNWYQQKPGKAPKLLIYYTSRLESGVPSRFSGSGSGTDYTLTISSLQPEDFATYYCQQGNTLPWTFGQGTKVEIKGGGGSGGGGSGGGGSEVQLVESGGGLVQPGGSLRLSCAASGYSFTGYTMNWVRQAPGKGLEWVALINPYKGVSTYNQKFKDRFTISVDKSKNTAYLQMNSLRAEDTAVYYCARSGYYGDSDWYFDVWGQGTLVTVSSGGGGSGGGGSGGGGSKFTIVFPHNQKGNWKNVPSNYHYCPSSSDLNWHNDLIGTALQVKMPKSHKAIQADGWMCHASKWVTTCDFRWYGPKYITHSIRSFTPSVEQCKESIEQTKQGTWLNPGFPPQSCGYATVTDAEAVIVQVTPHHVLVDEYTGEWVDSQFINGKCSNYICPTVHNSTTWHSDYKVKGLCDSNLISMDITFFSEDGELSSLGKEGTGFRSNYFAYETGGKACKMQYCKHWGVRLPSGVWFEMADKDLFAAARFPECPEGSSISAPSQTSVDVSLIQDVERILDYSLCQETWSKIRAGLPISPVDLSYLAPKNPGTGPAFTIINGTLKYFETRYIRVDIAAPILSRMVGMISGTTTERELWDDWAPYEDVEIGPNGVLRTSSGYKFPLYMIGHGMLDSDLHLSSKAQVFEHPHIQDAASQLPDDESLFFGDTGLSKNPIELVEGWFSSWKSSIASFFFIIGLIIGLFLVLRVGIHLCIKLKHTKKRQIYTDIEMNRLGK

SEQ ID NO: 348 - protein, 767 aa, Artificial Sequence
  Synthetic: UCHT1-hinge-VSVG
MKCLLYLAFLFIGVNCDIQMTQSPSSLSASVGDRVTITCRASQDIRNYLNWYQQKPGKAPKLLIYYTSRLESGVPSRFSGSGSGTDYTLTISSLQPEDFATYYCQQGNTLPWTFGQGTKVEIKGGGGSGGGGSGGGGSEVQLVESGGGLVQPGGSLRLSCAASGYSFTGYTMNWVRQAPGKGLEWVALINPYKGVSTYNQKFKDRFTISVDKSKNTAYLQMNSLRAEDTAVYYCARSGYYGDSDWYFDVWGQGTLVTVSSEPKSCDKTHTCPKFTIVFPHNQKGNWKNVPSNYHYCPSSSDLNWHNDLIGTALQVKMPKSHKAIQADGWMCHASKWVTTCDFRWYGPKYITHSIRSFTPSVEQCKESIEQTKQGTWLNPGFPPQSCGYATVTDAEAVIVQVTPHHVLVDEYTGEWVDSQFINGKCSNYICPTVHNSTTWHSDYKVKGLCDSNLISMDITFFSEDGELSSLGKEGTGFRSNYFAYETGGKACKMQYCKHWGVRLPSGVWFEMADKDLFAAARFPECPEGSSISAPSQTSVDVSLIQDVERILDYSLCQETWSKIRAGLPISPVDLSYLAPKNPGTGPAFTIINGTLKYFETRYIRVDIAAPILSRMVGMISGTTTERELWDDWAPYEDVEIGPNGVLRTSSGYKFPLYMIGHGMLDSDLHLSSKAQVFEHPHIQDAASQLPDDESLFFGDTGLSKNPIELVEGWFSSWKSSIASFFFIIGLIIGLFLVLRVGIHLCIKLKHTKKRQIYTDIEMNRLGK

SEQ ID NO: 349 - protein, 6 aa, Artificial Sequence
  Linker
GSTSGS

SEQ ID NO: 350 - DNA, 1179 bp, Artificial Sequence
  Synthetic: EF1a
ggctccggtgcccgtcagtgggcagagcgcacatcgcccacagtccccgagaagttggggggaggggtcggcaattgaaccggtgcctagagaaggtggcgcggggtaaactgggaaagtgatgtcgtgtactggctccgcctttttcccgagggtgggggagaaccgtatataagtgcagtagtcgccgtgaacgttctttttcgcaacgggtttgccgccagaacacaggtaagtgccgtgtgtggttcccgcgggcctggcctctttacgggttatggcccttgcgtgccttgaattacttccacctggctgcagtacgtgattcttgatcccgagcttcgggttggaagtgggtgggagagttcgaggccttgcgcttaaggagccccttcgcctcgtgcttgagttgaggcctggcctgggcgctggggccgccgcgtgcgaatctggtggcaccttcgcgcctgtctcgctgctttcgataagtctctagccatttaaaatttttgatgacctgctgcgacgctttttttctggcaagatagtcttgtaaatgcgggccaagatctgcacactggtatttcggtttttggggccgcgggcggcgacggggcccgtgcgtcccagcgcacatgttcggcgaggcggggcctgcgagcgcggccaccgagaatcggacgggggtagtctcaagctggccggcctgctctggtgcctggcctcgcgccgccgtgtatcgccccgccctgggcggcaaggctggcccggtcggcaccagttgcgtgagcggaaagatggccgcttcccggccctgctgcagggagctcaaaatggaggacgcggcgctcgggagagcgggcgggtgagtcacccacacaaaggaaaagggcctttccgtcctcagccgtcgcttcatgtgactccactgagtaccgggcgccgtccaggcacctcgattagttctcgagcttttggagtacgtcgtctttaggttggggggaggggttttatgcgatggagtttccccacactgagtgggtggagactgaagttaggccagcttggcacttgatgtaattctccttggaatttgccctttttgagtttggatcttggttcattctcaagcctcagacagtggttcaaagtttttttcttccatttcaggtgtcgtga

SEQ ID NO: 351 - DNA, 511 bp, Artificial Sequence
  Synthetic: PGK
ggggttggggttgcgccttttccaaggcagccctgggtttgcgcagggacgcggctgctctgggcgtggttccgggaaacgcagcggcgccgaccctgggtctcgcacattcttcacgtccgttcgcagcgtcacccggatcttcgccgctacccttgtgggccccccggcgacgcttcctgctccgcccctaagtcgggaaggttccttgcggttcgcggcgtgccggacgtgacaaacggaagccgcacgtctcactagtaccctcgcagacggacagcgccagggagcaatggcagcgcgccgaccgcgatgggctgtggccaatagcggctgctcagcggggcgcgccgagagcagcggccgggaaggggcggtgcgggaggcggggtgtggggcggtagtgtgggccctgttcctgcccgcgcggtgttccgcattctgcaagcctccggagcgcacgtcggcagtcggctccctcgttgaccgaatcaccgacctctctccccag

SEQ ID NO: 352 - DNA, 30 bp, Artificial Sequence
  Synthetic: 1x NFAT
ggaggaaaaactgtttcatacagaaggcgt

SEQ ID NO: 353 - DNA, 372 bp, Artificial Sequence
  Synthetic: 6X NFAT
ataagcttgatatcgaattaggaggaaaaactgtttcatacagaaggcgtcaattaggaggaaaaactgtttcatacagaaggcgtcaattaggaggaaaaactgtttcatacagaaggcgtcaattggtcccatcgaattaggaggaaaaactgtttcatacagaaggcgtcaattaggaggaaaaactgtttcatacagaaggcgtcaattaggaggaaaaactgtttcatacagaaggcgtcaattggtcccgggacattttgacacccccataatatttttccagaattaacagtataaattgcatctcttgttcaagagttccctatcactctcttaaatcactactcatagtaacctcaactcctg

SEQ ID NO: 354 - DNA, 114 bp, Artificial Sequence
  Synthetic: minIL2P
cattttgacacccccataatatttttccagaattaacagtataaattgcatctcttgttcaagagttccctatcactctcttaaatcactactcatagtaacctcaactcctga

SEQ ID NO: 355 - DNA, 373 bp, Artificial Sequence
  Synthetic: 6X NFAT-minIL2P
ataagcttgatatcgaattaggaggaaaaactgtttcatacagaaggcgtcaattaggaggaaaaactgtttcatacagaaggcgtcaattaggaggaaaaactgtttcatacagaaggcgtcaattggtcccatcgaattaggaggaaaaactgtttcatacagaaggcgtcaattaggaggaaaaactgtttcatacagaaggcgtcaattaggaggaaaaactgtttcatacagaaggcgtcaattggtcccgggacattttgacacccccataatatttttccagaattaacagtataaattgcatctcttgttcaagagttccctatcactctcttaaatcactactcatagtaacctcaactcctga

SEQ ID NO: 356 - DNA, 295 bp, Artificial Sequence; identical to SEQ ID NO: 319
  Synthetic: b-globin polyA spacer B

SEQ ID NO: 357 - DNA, 512 bp, Artificial Sequence; identical to SEQ ID NO: 320
  Synthetic: b-globin polyA spacer A

SEQ ID NO: 358 - DNA, 243 bp, Artificial Sequence; identical to SEQ ID NO: 321
  Synthetic: 250 cHS4 insulator v1

SEQ ID NO: 359 - DNA, 243 bp, Artificial Sequence; identical to SEQ ID NO: 322
  Synthetic: 250 cHS4 insulator v2

SEQ ID NO: 360 - DNA, 650 bp, Artificial Sequence; identical to SEQ ID NO: 323
  Synthetic: 650 cHS4 insulator

SEQ ID NO: 361 - DNA, 420 bp, Artificial Sequence; identical to SEQ ID NO: 324
  Synthetic: 400 cHS4 insulator

SEQ ID NO: 362 - DNA, 949 bp, Artificial Sequence; identical to SEQ ID NO: 325
  Synthetic: 650 cHS4 insulator and b-globin polyA spacer B

SEQ ID NO: 363 - DNA, 949 bp, Artificial Sequence; identical to SEQ ID NO: 326
  Synthetic: b-globin polyA spacer B and 650 cHS4 insulator

SEQ ID NO: 364 - DNA, 1761 bp, Artificial Sequence
  Synthetic: E006-T016-S186-S050 eTag
atggctctgcctgtgacagctctgctgctgcctctggctctgcttctgcatgctgctagacctagaaaagtgtgcaacggcatcggcatcggagagttcaaggacagcctgagcatcaacgccaccaacatcaagcacttcaagaactgcaccagcatcagcggcgacctgcacattctgcctgtggcctttagaggcgacagcttcacccacacacctccactggatccccaagagctggacatcctgaaaaccgtgaaagagatcaccggatttctgttgatccaggcttggcccgagaaccggacagatctgcacgccttcgagaacctggaaatcatcagaggccggaccaagcagcacggccagttttctctggctgtggtgtccctgaacatcaccagcctgggcctgagaagcctgaaagaaatcagcgacggcgacgtgatcatctccggcaacaagaacctgtgctacgccaacaccatcaactggaagaagctgttcggcaccagcggccagaaaacaaagatcatcagcaaccggggcgagaacagttgcaaggctacaggccaagtgtgccacgctctgtgtagccctgaaggctgttggggacccgagcctagagattgcgtgtcctgcagaaacgtgtcccggggcagagaatgcgtggacaagtgcaatctgctggaaggcgagccccgcgagttcgtggaaaacagcgagtgcatccagtgtcaccccgagtgtctgccccaggccatgaacattacatgtaccggcagaggccccgacaactgcattcagtgcgcccactacatcgacggccctcactgcgtgaaaacatgtcctgctggcgtgatgggagagaacaacaccctcgtgtggaagtatgccgacgccggacacgtgtgccacctgtgtcaccctaattgcacctatggctgtaccggccctggcctggaaggctgtccaacaaacggcctggaacggatcgcccggctggaagagaaagtgaaaacactgaaggcccagaacagcgagctggcctccacagccaacatgctgagagaacaggtggcccagctgaagcagaaagtcggcggctctaatctgggcagcgtgtacatctacgtgctgctgatcgtgggcacactcgtgtgcggaatcgtgctgggctttctgtttggcggcagcagatggcagttccccgctcactatcggagactgagacacgccctgtggccatctctgcccgatctgcaccgggtgctgggccagtatctgagagataccgccgctctgtctccacctaaggccaccgtgtccgatacatgcgaggaagtggaacccagcctgctggaaatcctgcccaagagcagcgagagaacccctctgcctctgtgttctagccaggctcagatggactaccgcagactgcagcctagctgcctgggaacaatgcccctgtctgtgtgtcctcccatggccgagagcggcagctgctgcacaacccacattgccaaccacagctacctgcctctgagctactggcagcaacctggcggatcaaagaaggtggccaagaagcccaccaacaaggcccctcatcctaagcaagagccccaagagatcaacttccccgacgatctgcccggcagcaatactgctgctcccgtgcaagaaaccctgcacggttgtcagcccgtgacacaagaggacggcaaagaaagccggatcagcgtccaagaacggcagtaa

SEQ ID NO: 365 - DNA, 239 bp, Artificial Sequence
  Synthetic: No Insulator spacer C
atctcaagagtggcagcggtcttgagtggcagcggcggtatacggcagcggcatgtaactagctcctcagtggcagcgatgaggaggcaggttctgttaagtaactgaacccaatgtcgttagtgacgcttagctcttaagaggtcactgacctaacaatctcaagagtggcagcggtcttgagtggcagcggcggtatacggcagcgctatctaagtagtaacaagtagcgtggggca

SEQ ID NO: 366 - protein, 905 aa, Artificial Sequence; identical to SEQ ID NO: 346
  Synthetic: UMuLVSUx

SEQ ID NO: 367 - protein, 770 aa, Artificial Sequence; identical to SEQ ID NO: 347
  Synthetic: UCHT1-(G4S)3-VSVG

SEQ ID NO: 368 - protein, 376 aa, herpes simplex virus 7
MASYPCHQHASAFDQAARSRGHSNRRTALRPRRQQEATEVRLEQKMPTLLRVYIDGPHGMGKTTTTQLLVALGSRDDIVYVPEPMTYWQVLGASETIANIYTTQHRLDQGEISAGDAAVVMTSAQITMGMPYAVTDAVLAPHIGGEAGSSHAPPPALTLIFDRHPIAALLCYPAARYLMGSMTPQAVLAFVALIPPTLPGTNIVLGALPEDRHIDRLAKRQRPGERLDLAMLAAIRRVYGLLANTVRYLQGGGSWREDWGQLSGTAVPPQGAEPQSNAGPRPHIGDTLFTLFRAPELLAPNGDLYNVFAWALDVLAKRLRPMHVFVLDYDQSPAGCRDALLQLTSGMVQTHVTTPGSIPTICDLARTFAREMGEAN

SEQ ID NO: 369 - protein, 427 aa, Homo sapiens
MGAGATGRAMDGPRLLLLLLLGVSLGGAKEACPTGLYTHSGECCKACNLGEGVAQPCGANQTVCEPCLDSVTFSDVVSATEPCKPCTECVGLQSMSAPCVEADDAVCRCAYGYYQDETTGRCEACRVCEAGSGLVFSCQDKQNTVCEECPDGTYSDEANHVDPCLPCTVCEDTERQLRECTRWADAECEEIPGRWITRSTPPEGSDSTAPSTQEPEAPPEQDLIASTVAGVVTTVMGSSQPVVTRGTTDNLIPVYCSILAAVVVGLVAYIAFKRWNSCKQNKQGANSRPVNQTPPPEGEKLHSDSGISVDSQSLHDQQPHTQTASGQALKGDGGLYSSLPPAKREEVEKLLNGSAGDTWRHLAGELGYQPEHIDSFTHEACPVRALLASWATQDSATLDALLAALRRIQRADLVESLCSESTATSPV

SEQ ID NO: 370 - protein, 297 aa, Homo sapiens
MTTPRNSVNGTFPAEPMKGPIAMQSGPKPLFRRMSSLVGPTQSFFMRESKTLGAVQIMNGLFHIALGGLLMIPAGIYAPICVTVWYPLWGGIMYIISGSLLAATEKNSRKCLVKGKMIMNSLSLFAAISGMILSIMDILNIKISHFLKMESLNFIRAHTPYINIYNCEPANPSEKNSPSTQYCYSIQSLFLGILSVMLIFAFFQELVIAGIVENEWKRTCSRPKSNIVLLSAEEKKEQTIEIKEEVVGLTETSSQPKNEEDIEIIPIQEEEEEETETNFPEPPQDQESSPIENDSSP

SEQ ID NO: 371 - protein, 12 aa, Homo sapiens
GQNDTSQTSSPS

SEQ ID NO: 372 - protein, 654 aa, Artificial Sequence; identical to SEQ ID NO: 345
  Synthetic: MuLVSUx

SEQ ID NO: 373 - protein, 20 aa, Artificial Sequence
  Synthetic
GGGGSGGGGSGGGGSGGGGS

SEQ ID NO: 374 - protein, 546 aa, Nipah henipavirus
MVVILDKRCYCNLLILILMISECSVGILHYEKLSKIGLVKGVTRKYKIKSNPLTKDIVIKMIPNVSNMSQCTGSVMENYKTRLNGILTPIKGALEIYKNNTHDLVGDVRLAGVIMAGVAIGIATAAQITAGVALYEAMKNADNINKLKSSIESTNEAVVKLQETAEKTVYVLTALQDYINTNLVPTIDKISCKQTELSLDLALSKYLSDLLFVFGPNLQDPVSNSMTIQAISQAFGGNYETLLRTLGYATEDFDDLLESDSITGQIIYVDLSSYYIIVRVYFPILTEIQQAYIQELLPVSFNNDNSEWISIVPNFILVRNTLISNIEIGFCLITKRSVICNQDYATPMTNNMRECLTGSTEKCPRELVVSSHVPRFALSNGVLFANCISVTCQCQTTGRAISQSGEQTLLMIDNTTCPTAVLGNVIISLGKYLGSVNYNSEGIAIGPPVFTDKVDISSQISSMNQSLQQSKDYIKEAQRLLDTVNPSLISMLSMIILYVLSIASLCIGLITFISFIIVEKKRNTYSRLEDRRVRPTSSGDLYYIGT

SEQ ID NO: 375 - protein, 602 aa, Nipah henipavirus
MPAENKKVRFENTTSDKGKIPSKVIKSYYGTMDIKKINEGLLDSKILSAFNTVIALLGSIVIIVMNIMIIQNYTRSTDNQAVIKDALQGIQQQIKGLADKIGTEIGPKVSLIDTSSTITIPANIGLLGSKISQSTASINENVNEKCKFTLPPLKIHECNISCPNPLPFREYRPQTEGVSNLVGLPNNICLQKTSNQILKPKLISYTLPVVGQSGTCITDPLLAMDEGYFAYSHLERIGSCSRGVSKQRIIGVGEVLDRGDEVPSLFMTNVWTPPNPNTVYHCSAVYNNEFYYVLCAVSTVGDPILNSTYWSGSLMMTRLAVKPKSNGGGYNQHQLALRSIEKGRYDKVMPYGPSGIKQGDTLYFPAVGFLVRTEFKYNDSNCPITKCQYSKPENCRLSMGIRPNSHYILRSGLLKYNLSDGENPKVVFIEISDQRLSIGSPSKIYDSLGQPVFYQASFSWDTMIKFGDVLTVNPLVVNWRNNTVISRPGQSQCPRFNTCPEICWEGVYNDAFLIDRINWISAGVFLDSNQTAENPVFTVFKDNEILYRAQLASEDTNAQKTITNCFLLKNKIWCISLVEIYDTGDNVIRPKLFAVKIPEQCT

SEQ ID NO: 376 - DNA, 774 bp, Artificial Sequence
  scFv
gatgttgtgatgactcagtctccatcctccctgtccgcatctgtaggagacagagtcaccatcacttgccgggcaagtcagagtattagcagctatttaaattggtatcagcagaaaccagggaaagcccctaagctcctgatctatgctgcatccagtttgcaaagtggggtcccatcacggtttagtggcagtggatctgggacagatttcactctcaccatcagcagtctgcaacctgaagattttgcaacttactactgtcaacagagttacagtaggcctcctacgttcggccaagggaccaagctggagatcaaacgtggaggcggtggctccggaggcgggggtagtggaggcggagggagcggagggggaggaagcgcccaggtgcagctgcaggagtctgggggaggcctggtccagcctggggggtccctgagactctcgtgtgcagcctctggattcaccttcagtagctatagcatgaactgggtccgccaggctccagggaaggggctggagtgggtctcatccattagtagtcgtagtaatgacatatactacgcagactcagtgaagggccgattcaccatctccagagacaacgccaagaactcactgtatctgcaaatgaacagcctgagagccgaggacacggctgtgtattactgtgcgagaccctattactttgatagtagtggttatgtcaattactactcctactacggtttggacgtctggggccaagggaccacggtcaccgtctcctca

SEQ ID NO: 377 - DNA, 750 bp, Artificial Sequence
  scFv
gaaattgtgctgactcagtctccatcctccctctctgcatctgtaggagacagagtcaccatcacttgccgggcaagtcagagcattagcaggtatttaaattggtatcagcaaaaaccagggaaagcccctaagctcctgatctatgctgcatccagtttgcaaagtggggtcccatcaaggttcagtggcagtggatctgggacagatttcactctcaccatcagcagtctgcaacctgaagattttgcaacttactactgtcagcagagatacagtattccctacgatttcggccctgggacacgactggagattaaacgtggaggcggtggctccggaggcgggggtagtggaggcggagggagcggagggggaggaagcgccgaggtgcagctgttgcagtctggagcagaggtgaaaaagcccggggagtctctgaagatctcctgtaaggtttctggatacagcttttccagctactggatcggctgggtgcgccagatgcccgggaaaggcctggaatggatggggatcatctatcctggtgactccaataccagatacagcccgtccttccaaggccaggtctccttctcggccgacaagtccatcagcaccgcctacctgcagtggagcagcctgaaggcctcggacaccgccatgtattactgtgcgaggcttatctatggtgactacggtgggggtcttgactactggggccagggaaccctggtcaccgtctcctca

SEQ ID NO: 378 - DNA, 744 bp, Artificial Sequence
  scFv
gaaattgtgctgactcagtctccatcctccctgtctgcatctgtaggagacagagtcaccatcacttgccgggcaagtcagagcattagcagctatttaaattggtatcagcagaaaccagggaaagcccctaagctcctgatctatgctgcatccagtttgcaaagtggggtcccatcaaggttcagtggcagtggatctgggacagatttcactctcaccatcagcagtctgcaacctgaagattttgcaacttactactgtcaacagagttacagtacccgaccgtggacgttcggccaagggaccaagctggagatcaaacgtggaggcggtggctccggaggcgggggtagtggaggcggagggagcggagggggaggaagcgccgaggtgcagctgttgcagtctggggctgaggtgaagaagcctgggtcctcggtgaaggtctcctgcaaggcttctggaggcaccttcagcagctatgctatcagctgggtgcgacaggcccctggacaagggcttgagtggatgggagggatcatccctatctttggtacagcaaactacgcacagaagttccagggcagagtcacgattaccgcggacgaatccacgagcacagcctacatggagctgagcagcctgagatctgaggacacggccgtgtattactgtgcgagggtgtatagcagtggctggtttgactactggggccagggcaccctggtcaccgtctcctca

SEQ ID NO: 379 - DNA, 753 bp, Artificial Sequence
  scFv
gacatcgtgatgacccagtctccatccttcctgtctgcatctgtaggagacagagtcaccatcacttgccgggccaatcagggcattagcagttttttagcctggtatcagcaaaaaccagggaaagcccctaagctcctgatcaatgctgcatccactttgcaaagtggggtcccatcaagattcagcggcagtggatctgggacacaattcactctcacaatcagcagcctgcagcctgaagattttgcaacttattactgtcaacagcatagtagttaccctctcactttcggcggagggaccaaggtggagatcaaacgtggaggcggtggctccggtggcggcggatccggaggcgggggtagtggaggcggagggagcggagggggaggaagcgccgaggtgcagctgttgcagtctggagcagaggtgaaaaagcccggggagtctctgaggatctcctgtaagggttctggatacagctttaccagctactggatcgcctgggtgcgccagatgcccgggaaaggcctggagtggatggggatcatctatcctggtgagtctgatatcagatacagcccgtcgttccaaggccaggtcaccatctcagccgacaagtccatcagcaccgcctacctgcagtggagcagcctgaaggcctcggacaccgccatgtattactgtgcgagacagaggtactggtacttcgatctctggggccgtggaaccctggtcaccgtctcctca

SEQ ID NO: 380 - DNA, 729 bp, Artificial Sequence
  scFv
gacatccagatgacccagtctccactctccctgcccgtcacccctggagagccggcctccatctcctgcaggtctagtcagagcctcctgcatagtaatggatacaactatttggattggtacctgcagaagccagggcagtctccacagctcctgatctatttgggttctaatcgggcctccggggtccctgacaggttcagtggcagtggatcaggcacagattttacactgaaaatcagcagagtggaggctgaggatgttggggtttattactgcatgcaagctctacaaacttccacgtacagttttggccaggggaccaagctggagatcaaacgtggaggcagctcccggtcaagcgcccaggtgcagctggtgcagtctggcccaggactggtgaagccttccgagaccctgtccctcacctgcgctgtctctggtgactccatccgtggtcactattggagctggatccggcagaccgccgggaagggcctggagtggattggttacacatctgatactggggataccaagtacaatccctccctcgggagtcgcgtcaccatgtcactggacacgtccaagaaccagttgtccctgaacctgaggtctgtaaccgccacggacacggccctctattactgtgcaagagttgatcccgaagatccctcaggagcactgttggacctctggggccagggcaccctggtcaccgtctcctca

SEQ ID NO: 381 - DNA, 741 bp, Artificial Sequence
  scFv
gacatccagatgacccagtctccatcctccctgtccgcatctgtaggagacagagtcaccatcacttgccgggcaagtcagagtattagcagctatttaaattggtatcagcagaaaccagggaaagcccctaagctcctgatctatgctgcatccagtttgcaaagtggggtcccatcacggtttagtggcagtggatctgggacagatttcactctcaccatcagcagtctgcaacctgaagattttgcaacttactactgtcaacagagttacagtaggcctcctacgttcggccaagggaccaagctggagatcaaacgtggaggcggtggctccggaggcgggggtagtggaggcggagggagcggagggggaggaagcgcccaggtgcagctggtgcagtctggggctgaggtgaagaagcctggggcctcagtgaaggtttcctgcaaggcatctggatacaccttcaccagctactatatgcactgggtgcgacaggcccctggacaagggcttgagtggatgggaataatcaaccctagtggtggtagcacaagctacgcacagaagttccagggcagagtcaccatgaccagggacacgtccacgagcacagtctacatggagctgagcagcctgagatctgaggacacggccgtgtattactgtgcgaggtctaagggcaaagggccctttgactactggggccagggaaccctggtcaccgtctcctca

SEQ ID NO: 382 - DNA, 780 bp, Artificial Sequence
  scFv
gatgttgtgatgactcagtctccactctccttgcccgtcacccctggagagccggcctccatctcctgcaggtctagtcagagcctcctgcatagtaatggatacaactatttggattggtacctgcagaagccagggcagtctccacagctcctgatctatttgggttctaatcgggcctccggggtccctgacaggttcagtggcagtggatcaggcacagattttacactgaaaatcagcagagtggaggctgaggatgttggggtttattactgcatgcaagctctacaaactccgtacacttttggccaggggaccaagctggagatcaaacgtggaggcggtggctccggcggtggtgggtccggtggcggcggatccggaggcgggggtagtggaggcggagggagcggagggggaggaagcgcccaggtgcagctgcaggagtcgggcccaggactggtgaagccttcggagaccctgtccctcacctgcactgtctctggttactccatcaccagtcgttcctactggggctgggtccggcagtccccagggaaggggctggaatggcttgggagtttgtcctggactggaagtactcaatacaacccgtccctcaggggtcgagtcacaatatcactggacaggtccaacagtcaattctccctgaggttgacctctgtgtccgccgccgacacggccacttactactgtgtgagagataatagagcccttgactcctggggccagggaaccctggtcaccgtctcctca

SEQ ID NO: 383 - DNA, 774 bp, Artificial Sequence
  scFv
gaaattgtgctgactcagtctccaggcaccctgtctttgtctccaggggaaagagccaccctctcctgcagggccagtcagagtgttagcagcagctacttagcctggtaccagcagaaacctggccaggctcccaggctcctcatctatggtgcatccagcagggccactggcatcccagacaggttcagtggcagtgggtctgggacagacttcactctcaccatcagcagactggagcctgaagattttgcagtgtattactgtcagcagtatggtagctcaccaggggtgtacacttttggccaggggaccaaagtggatatcaaacgtggaggcggtggctccggcggtggtgggtccggtggcggcggatccggaggcgggggtagtggaggcggagggagcggagggggaggaagcgcccaggtgcagctgcaggagtcgggcccaggactggtgaagccttcggagaccctgtccctcacctgcactgtctctggttactccatcaccagtcgttcctactggggctgggtccggcagtccccagggaaggggctggaatggcttgggagtttgtcctggactggaagtactcaatacaacccgtccctcaggggtcgagtcacaatatcactggacaggtccaacagtcaattctccctgaggttgacctctgtgtccgccgccgacacggccacttactactgtgtgagagataatagagcccttgactcctggggccagggaaccctggtcaccgtctcctca

SEQ ID NO: 384 - DNA, 765 bp, Artificial Sequence
  scFv
gacatccagatgacccagtctccatcctccctgtctgcatctgtaggagacagagtcaccatcacttgccgggcaagtcagggcattagcagtgctttagcctggtatcagcagaaaccagggaaagctcctaagctcctgatctatgatgcctccagtttgcaaagtggggtcccatcaaggttcagtggcagtggatctgggacagatttcactctcaccatcagcagtctgcaacctgaagattttgcaacttactactgtcaacagagttacattacccctcacacttttggccaggggaccaagctggaaatcaaacgtggaggcggtggctccggaggcgggggtagtggaggcggagggagcggagggggaggaagcgcccaggtcaacttaagggagtctgggggaggcttggtccagcctggggggtccctgagactctcctgtgcagcctctggattcacctttagtagctattggatgagctgggtccgccaggctccagggaaggggctggagtgggtggccaacataaagcaagatggaagtgagaaatactatgtggactctgtgaagggccgattcaccatctccagagacaacgccaagaactcactgtatctgcaaatgaacagcctgagagccgaggacacggctgtgtattactgtgcgagagcggtgggcgatagcagtggctggtaccaagactactacggtatggacgtctggggccaagggacaatggtcaccgtctcttca

SEQ ID NO: 385 - DNA, 723 bp, Artificial Sequence
  scFv
gatgttgtgatgactcagtctccatcttccgtgtctgcatctgtaggagacagagtcaccatcacttgtcgggcgagtcagggtattagcagctggttagcctggtatcagcagaaaccagggaaagcccctaagctcctgatctatgctgcatccagtttgcaaagtggggtcccatcaaggttcagcggcagtggatctgggacagatttcactctcaccatcagcagcctgcagcctgaagattttgcaacttactattgtcaacaggctaacagtttcccgctcactttcggcggagggaccaagctggaaatcaaacgtggaggcggtggctccggaggcggagggagcggagggggaggaagcgccgaggtgcagctggtggagtctgggggaggcttggtacagcctggggggtccttgagactctcctgtgcagcctctggattcacctttgcccacgatgccatgagctgggtccgccaggctccagggaaggggctggaatgggtctcaactattacttatggtggtggtggcacatactacgcagactccgtgaagggccggttcaccatctccagagacaattccaagaacacgctatttctgcaaatgaacggcctgagagccgaggacacggccgtatattcctgtgcgagaggcggcgtgggggcgtttgactcctggggccagggaaccctggtcaccgtctcctca

SEQ ID NO: 386 - DNA, 798 bp, Artificial Sequence
  scFv
gacatcgtgatgacccagtctccactctccctgcccgtcacccctggagagccggcctccatctcctgcaggtctagtcagagcctccttcatagtaatggatacaactatttggattggtacctgcagaagccagggcagtctccacagctcctgatctatttgggttctaatcgggcctccggggtccctgacaggttcagtggcagtggatcaggcacagattttacactgaaaatcagcagagtgcaggctgaggatgttggggtttatttctgcatgcaagctctacaaactcctccaactttcggcggagggaccaagctggagatcaaacgtggaggcggtggctccggcggtggtgggtccggtggcggcggatccggaggcgggggtagtggaggcggagggagcggagggggaggaagcgcccaggtgcagctgcaggagtcggggggaggcgtggtccagcctgggaggtccctgacactctcctgtgcagcctctggattcaccttcagtagttatcctatgcactgggtccgccaggctccaggcaaggggctggagtgggtggcagttatatcacatgatgaaagcaataaatactacgcagactccgtgaagggccgattcaccatctccagagacaattccaagaacacgctgtatctgcaaatgaacagcctgagagctgaggacacggctgtgtattactgtgcgagggagcgggggggagggtacagttatgggataggggactactggggccagggcaccctggtcaccgtctcctca

SEQ ID NO: 387 - DNA, 741 bp, Artificial Sequence
  scFv
gaaattgtgttgacgcagtctccttccaccctgtctgcatctgtaggagacagagtcaccatcacttgccgggccagtcagagtattagtagctggttggcctggtatcagcagaaaccagggaaagcccctaagctcctgatctataaggcatctactttagaaagtggggtcccatcaaggttcagcggcagtggatctgggacagaattcactctcaccatcagcagcctgcagcctgatgattttgcaagttattactgccaacagtatcatacttattggactttcggccctgggaccaaagtggatatcaaacgtggaggcggtggctccggaggcgggggtagtggaggcggagggagcggagggggaggaagcgccgaggtgcagctggtggagtcgggcccaggactggtgaagccttcacagaccctgtccctcacctgcactgtctctggtggctccatcagcagtggtggttactactggagctggatccgccagcacccagggaagggcctggagtggattgggtacatctattacagtgggagcacctactacaacccgtccctcaagagtcgagttaccatatcagtagacacgtctaagaaccagttctccctgaagctgagctctgtgactgccgcggacacggccgtgtattactgtgcgagagatcgtagtgaaagggcttttgatatctggggccaagggacaatggtcaccgtctcttca

SEQ ID NO: 388 - DNA, 726 bp, Artificial Sequence
  scFv
gatgttgtgatgactcagtctccatcctccctgtctgcatctgttggagacagagtcaccatcacttgccgggcaagtcagactattcgcaactatttaaattggtatcagcacaaaccagggaaagcccctaagctcctgatctatgctgcatccagtttgcaaagtggggtcccatcaaggttcagtggcagtggatctgggacagatttcactctcaccatcagcagtctgcaacctgaagattttgcaacttactactgtcaacagagttacagtacccccatcaccttcggccgagggacacgactggagattaaacgtggaggcggtggctccggaggcggagggagcggagggggaggaagcgccgaggtgcagctgttgcagtctggggctgaggtgaaagagcctggggcctcagtgaaggtctcctgcaaggcttctggatacaccttcaccgggaattatattcactgggtgcgacaggcccctggacaagggcttcagtggatgggatggatcaaccctaacactgatggcacaagatacagtccgaactttcagggcaggctcaccttcaccagggacacgtccatcaacacagcctacttggaactgaacaggctgacatctgacgacacggccgtgtactactgtgcgagagatacgactggcaatgcttttcatatctggggccaagggacaatggtcaccgtctcttca

SEQ ID NO: 389 - DNA, 735 bp, Artificial Sequence
  scFv
gccgaggtgcagctgttgcagtctggaggaggcttgatccagcctggggggtccctgagactctcctgtgcagcctctgggttcaccgtcagtagcaactacatgagctgggtccgccaggctccagggaaggggctggagtgggtctcagttatttatagcggtggtagcacatactacgcagactccgtgaagggccgattcaccatctccagagacaattccaagaacacgctgtatcttcaaatgaacagcctgagagccgaggacacggccgtgtattactgtgcgagagatcagcccggcgccaggttcgacccctggggccagggaaccctggtcaccgtctcctcaggaggcggtggctccggaggcggagggagcggagggggaggaagcgaaattgtgctgactcagtctccatcctccctgtctgcatctgtaggagacagagtcaccatcgcttgccgggcaagtcagagcattagcggctatttaaattggtatcagcagaaaccagggaaagcccctaagctcctgatctatgctgcatccagtttgcaaagtggggtcccatcaaggttcagtggcagtggatctgggacagatttcactctcaccatcagcagtctgcaacctgaagattttgcaacttactactgtcaacagagttacagtagtcctcagctaccaatgtacacttttggccaggggaccaagctggaaatcaaacgt

SEQ ID NO: 390 - DNA, 759 bp, Artificial Sequence
  scFv
gatgttgtgatgactcagtctccaggcaccctgtctttgtctccaggggaaagagccaccctctcctgcagggccagtcagagtgttagcggcagctacttagcctggtaccagcagaaacctggccgggctcccaggctcctcatctatggtgcatccagcagggccactggcatcccagacaggttcagtggcagtgggtctgggacagacttcactctcaccatcagcagactggagcctgaagattttgcagtgtattactgtcagcattatggtagctcaccgctcactttcggcggagggaccaaggtggagatcaaacgtggaggcggtggctccggtggcggcggatccggaggcgggggtagtggaggcggagggagcggagggggaggaagcgccgaggtgcagctggtggagtctgggggaggcttggtacagcctggggggtccctgagactctcctgtgcagcctctggattcacctttagcagctatgccatgagctgggtccgccaggctccagggaaggggctggagtgggtctcagctattagtggtagtggtggtagcacatactacgcagactccgtgaagggccggttcaccatctccagagacaattccaagaacacgctgtatctgcaaatgaacagcctgagagccgaggacacggccgtatattactgtgcgaaagacccagagatggctacaattcactactggggccagggaaccctggtcaccgtctcctca

SEQ ID NO: 391 - DNA, 756 bp, Artificial Sequence
  scFv
gaaattgtgctgactcagtctccaggcaccctgtctttgtctccaggggaaagagccatcctctcctgcagggccagtcagagtgttagcagcagctacttagcctggtaccagcagaaacctggccaggctcccaggctcctcatctttggtgcatccaccagggccactggcgtcccagacaggttcagtggcagtgggtccgggacagacttcactctcaccatcagcaggctggagcctgaagatcttgcagtgtattactgtcagcagtatggtagctcacccatgtacacttttggccaggggaccaagctggagatcaaacgtggaggcggtggctccggaggcgggggtagtggaggcggagggagcggagggggaggaagcgccgaggtgcagctggtggagtctgggggaggcgtggtccagcctgggaggtccctgagactctcctgtgcagcctctggattcaccttcagtagctatgctatgcactgggtccgccaggctccaggcaaggggctagagtgggtggcagttatatcatatgatggaagtaataaatactacgcagactccgtgaagggccgattcaccatctccagagacaattccaagaacacgctgtatctgcaaatgaacagcctgagagctgaggacacggctgtgtattactgtgcgagaagtgacggatacagctatcccagacactttgactactggggccagggaaccctggtcaccgtctcctca

SEQ ID NO: 392 - DNA, 774 bp, Artificial Sequence
  scFv
gaaattgtgttgacgcagtctccatcctccctgtctgcatctgtaggagacagggtcaccatcacttgccgggcaagtccgcgcattggaaatgatttaggctggtatcagcagaagccagggaaagcccctgagcgcctgatctatgctgcatccagtttgcaaagtggggtcccatcaaggttcagcggcagtggatctgggacagaattcactctcacaatcagcagcctgcagcctgaagattttgcaacttattactgtctacagcataataattacccgtacacttttggccaggggaccaaagtggatatcaaacgtggaggcggtggctccggcggtggtgggtccggtggcggcggatccggaggcgggggtagtggaggcggagggagcggagggggaggaagcgccgaggtgcagctggtgcagtctggagcagaggtgaaaaagcccggggagtctctgaagatctcctgtaagggttctggatacagctttaccagctactggatcggctgggtgcgccagatgcccgggaaaggcctggagtggatggggatcatctatcctggtgactctgataccagatacagcccgtccttccaaggccaggtcaccatctcagccgacaagtccatcagcaccgcctacctgcagtggagcagcctgaaggcctcggacaccgccatgtattactgtgcgagacagccggggtgggggggcccgttcgacccctggggccagggaaccctggtcaccgtctcctca

SEQ ID NO: 393 - DNA, 714 bp, Artificial Sequence
  scFv
gacatcgtgatgacccagtctccatcttccgtgtctgcatctgtaggagacagagtcaccatcacttgtcgggcgagtcagggtattagcagctggttagcctggtatcagcagaaaccagggaaagcccctaagctcctgatctatgctgcatccagtttgcaaagtggggtcccatcaaggttcagcggcagtggatctgggacagatttcactctcaccatcagcagcctgcagcctgaagattttgcaacttactattgtcaacaggctaacagtttcccgtacacttttggccaggggaccaagctggaaatcaaacgtggaggcggtggctccggagggggaggaagcgccgaggtgcagctgttgcagtctggagcagaggtgaaaaagcccggggagtctctgaagatctcctgtaagggttctggatacagctttaccagctactggatcggctgggtgcgccagatgcccgggaaaggcctggagtggatggggatcatctatcctggtgactctgataccagatacagcccgtccttccaaggccaggtcaccatctcagccgacaagtccatcagcaccgcctacctgcagtggagcagcctgaaggcctcggacaccgccatgtattactgtgcgagacagccggggtgggggggcccgttcgacccctggggccagggaaccctggtcaccgtctcctca

SEQ ID NO: 394 - DNA, 774 bp, Artificial Sequence
  scFv
gaaattgtgttgacgcagtctccatcctccctgtctgcatctgtaggagacagggtcaccatcacttgccgggcaagtccgggcattggaaatgatttaggctggtatcagcagaagccagggaaagcccctgagcgcctgatctatgctgcatccagtttgcaaagtggggtcccatcaaggttcagcggcagtggatctgggacagaattcactctcacaatcagcagcctgcagcctgaagattttgcaacttattactgtctacagcataataattacccgtacacttttggccaggggaccaaagtggatatcaaacgtggaggcggtggctccggcggtggtgggtccggtggcggcggatccggaggcgggggtagtggaggcggagggagcggagggggaggaagcgccgaggtgcagctggtgcagtctggagcagaggtgaaaaagcccggggagtctctgaagatctcctgtaagggttctggatacagctttaccagctactggatcggctgggtgcgccagatgcccgggaaaggcctggagtggatggggatcatctatcctggtgactctgataccagatacagcccgtccttccaaggccaggtcaccatctcagccgacaagtccatcagcaccgcctacctgcagtggagcagcctgaaggcctcggacaccgccatgtattactgtgcgagacagccggggtgggggggcccgttcgacccctggggccagggaaccctggtcaccgtctcctca

SEQ ID NO: 395 - DNA, 777 bp, Artificial Sequence
  scFv
gacatcgtgatgacccagtctccttccaccctgtctgcatctgtaggagacagagtcaccatcacttgccgggccagtcagagtattagtagctggttggcctggtatcagcagaaaccagggaaagcccctaagctcctgatctataaggcgtctagtttagaaagtggggtcccatcaaggttcagcggcagtggatctgggacagaattcactctcaccatcagcagcctgcagcctgatgattttgcaacttattactgccaacagtataatagttacccctacacttttggccaggggaccaaggtggagatcaaacgtggaggcggtggctccggcggtggtgggtccggtggcggcggatccggaggcgggggtagtggaggcggagggagcggagggggaggaagcgccgaggtacagctgcagcagtcgggcccaggactggtgaagccttcacagaccctgtccgtcacctgcactttctctggtggctccatcagcagtagtggttactactggaactggatccgccagcacccagggaagggcctggagtggattgggtacatctatcacagtgggagcacctactacaacccgtccctcaagcgtcgacttaccatgtcagtagacacgtctaagaaccagttctccctgaggttgagctctgtgactgccgcggacacggccgtgtattattgtgcgagaagtctgcggctctacggtttctttgactactggggccagggaaccctggtcaccgtctcctca

SEQ ID NO: 396 - DNA, 747 bp, Artificial Sequence
  scFv
gatgttgtgatgactcagtctccatcctccctgtctgcatctgtaggagacagagtcaccatcacttgccgggcaagtcagagcattagcagctatttaaattggtatcagcagaaaccagggaaagcccctaagctcctgatctatgctgcatccagtttgcaaagtggggtcccatcaaggttcagtggcagtggatctgggacagatttcactctcaccatcagcagtctgcaacctgaagattttgcaacttactactgtcaacagagttacagtacccgtatgtacacttttggccaggggaccaaggtggagatcaaacgtggaggcggtggctccggaggcgggggtagtggaggcggagggagcggagggggaggaagcgccgaggtgcagctggtggagtctgggggaggcttggtacagcctggcaggtccctgagactctcctgtgcagcctctggattcacctttgatgattatgccatgcactgggtccggcaagctccagggaagggcctggagtgggtctcaggtattagttggaatagtggtagcataggctatgcggactctgtgaagggccgattcaccatctccagagacaacgccaagaactccctgtatctgcaaatgaacagtctgagagctgaggacacggccttgtattactgtgcaaaagatttcacaggggataatgcttttgatatctggggccaagggacaatggtcaccgtctcttca

SEQ ID NO: 397 - DNA, 750 bp, Artificial Sequence
  scFv
gacatcgtgatgacccagtctccatcctccctgtctgcatctgtaggagacagagtcaccatcacttgccgggcaagtcagagcattagcagctatttaaattggtatcagcagaaaccagggaaagcccctaagctcctgatctatgctgcatccagtttgcaaagtggggtcccatcaaggttcagtggcagtggatctgggacagatttcactctcaccatcagcagtctgcaacctgaagattttgcaacttacttttgtcaacaggcttacagtttccccccgtacacttttggccaggggaccaagctggagatcaaacgtggaggcggtggctccggaggcgggggtagtggaggcggagggagcggagggggaggaagcgccgaggtacagctgcagcagtctggagcagaggtgaaaaagcccggggagtctctgaagatctcctgtaagggttctggatacagctttaccagctactggatcggctgggtgcgccagatgcccgggaaaggcctggagtggatggggatcatctatcctggtgactctgataccagatacagcccgtccttccaaggccaggtcaccatctcagccgacaagtccatcagcaccgcctacctgcagtggagcagcctgaaggcctcggacaccgccatgtattactgtgcgagactggctatggttcagggagccccagcggactactggggccagggcaccctggtcaccgtctcctca

SEQ ID NO: 398 - DNA, 735 bp, Artificial Sequence
  scFv
gccgaggtacagctgcagcagtctgggggaggcttggtcaagcctggagggtccctgagactgtcctgtgcagcctctggattcactttcagcgactcctatatgacttggattcggcagactccggggcagagtctcgagtgggtctcctacatttctaatagtggtgatgccatttactacgcaggctctgtgaggggccgattcatcgtctccagggacaactccaagaatttattgtttctgcaaatgaacaacctgagagccgacgactcggccacatattactgcacgactggaaaacgctcctatcgcgtctggggccagggcaccctggtcaccgtctcctcaggaggcggtggctccggaggcgggggtagtggaggcggagggagcggagggggaggaagcgaaattgtgctgactcagtctccatcctccctgtctgcatctgtaggagacagagtcaccatcacttgccgggcaagtcagagcattagcagctatttaaattggtatcagcagaaaccagggaaagcccctaagctcctgatctatgctgcatccagtttgcaaagtggggtcccatcaaggttcagtggcagtggatctgggacagatttcactctcaccatcagcagtctgcaacctgaagattttgcaacttactactgtcaacagagttacagtacccctcaaacttttggccaggggacacgactggagattaaacgt

SEQ ID NO: 399 - DNA, 756 bp, Artificial Sequence
  scFv
gacatccagatgacccagtctccttccaccctgtcagcatctgtaggagacagagtcaccatcacttgccgggccagtcagagtattagtacctggttggcctggtatcaacaaaaaccagggaaagcccctaacctcctgatctataaggcgtctactttaaaaagtggggtcccatcaaggttcagcggcagtggatctgggacagaattcactctcaccatcagcagcctgcagcctgatgattttgcaacttattactgccaacagtatgatagttccccgtacacttttggccaggggaccaagctggaaatcaaacgtggaggcggtggctccggaggcgggggtagtggaggcggagggagcggagggggaggaagcgccgaggtgcagctggtggagtctgggggaggcttggtacagcctggcaggtccctgagactctcctgtgcagcctctggattcacctttgatgattatgccatgcactgggtccggcaagctccagggaagggcctggagtgggtctcaggtattagttggaatagtggtagcataggctatgcggactctgtgaagggccgattcaccatctccagagacaacgccaagaactccctgtatctgcaaatgaacagtctgagagctgaggacacggccttgtattactgtgcaaaagatatctcccctgactggagcagggggggatggttcgacccctggggccagggcaccctggtcaccgtctcctca

SEQ ID NO: 400 - DNA, 756 bp, Artificial Sequence
  scFv
gacatcgtgatgacccagtctccatcttccgtgtctgcatctgtaggagacagagtcaccatcacttgtcgggcgagtcagggtattagcagctggttagcctggtatcagcagaaaccagggaaagcccctaagctcctgatctatgctgcatccagtttgcaaagtggggtcccatcaaggttcagcggcagtggatctgggacagatttcactctcaccatcagcagcctgcagcctgaagattttgcaacttactattgtcaacaggctaacagtttcccttacacttttggccaggggaccaagctggaaatcaaacgtggaggcggtggctccggaggcgggggtagtggaggcggagggagcggagggggaggaagcgccgaggtacagctgcagcagtctgggggaggcttggtacagcctggcaggtccctgagactctcctgtgcagcctctggattcacctttgatgattatgccatgcactgggtccggcaagctccagggaagggcctggagtgggtctcaggtattagttggaatagtggtagcataggctatgcggactctgtgaagggccgattcaccatctccagagacaacgccaagaactccctgtatctgcaaatgaacagtctgagagctgaggacacggccttgtattactgtgcaaaagatatctcccctgactggagcagggggggatggttcgacccctggggccagggaaccctggtcaccgtctcctca

SEQ ID NO: 401 - DNA, 720 bp, Artificial Sequence
  scFv
gccgaggtgcagctgttgcagtctggagcagaggtgaaaaagcccggggagtctctgaagatctcctgtagggattctggacacacctttggcgactactggatcggctgggtgcgccagatgcccgggaaaggcctggagtggatggggatcatttatcctgatgactctgatactagatatagcccgtccttccaaggccaggtcaccatctcagccgacaagtccatcagcaccgcctacctacagtggaacagcctgaaggcctcggacagcgccatatattactgtgcggcccggggcagtggctggtacagtgatgcttttgatgcctggggccaagggaccacggtcaccgtctcctcaggaggcggtggctccggagggggaggaagcgacatccagatgacccagtctccatcctccctgtctgcatctgtaggagacagagtcaccatcacttgccgggcaagtcagagcattagcacctatttaaattggtatcagcagaaaccagggaaagcccctaagctcctgatctatgctgcatccagtttgcaaagtggggtcccatcaaggttcagtggcagtggatctgggacagatttcaccctcaccatcagcagtctgcaacctgaagattttgcaacttactcctgtcaacagagttacagttaccccatcaccttcggccaagggacacgactggagattaaacgt

SEQ ID NO: 402 - DNA, 735 bp, Artificial Sequence
  scFv
gaaattgtgctgactcagtctccatcctccctgtccgcatctgtaggagacagagtcaccatcacttgccgggcaagtcagagtattagcagctatttaaattggtatcagcagaaaccagggaaagcccctaagctcctgatctatgctgcatccagtttgcaaagtggggtcccatcacggtttagtggcagtggatctgggacagatttcactctcaccatcagcagtctgcaacctgaagattttgcaacttactactgtcaacagagttacagtaggcctcctacgttcggccaagggaccaagctggaaatcaaacgtggaggcggtggctccggaggcggagggagcggagggggaggaagcgccgaggtgcagctggtggagtctgggggaggcttggtccagccgggggggtccctgagactctcctgttcagcctctggattcaccttcaatgactatgctatgcactgggtccgccaggctccagggaagggactggaatttgtttcagctattaacagtaatgggggtagcacatattacgcagactcagtgaagggcagattcaccatctccagagacaattccaagaacacgctctatatccaaatgagcagtctgagacctgaggacacggctgtgtattactgtgtgaaagtgggggggagcagcagctggtacgggtttgactactggggccagggaaccctggtcaccgtctcctca

SEQ ID NO: 403 - DNA, 744 bp, Artificial Sequence
  scFv
gatgttgtgatgactcagtctccaggcaccctgtctttgtctccaggggaaagagccaccctctcctgcagggccagtcagagtgttagcagcagctacttagcctggtaccagcagaaacctggccaggctcccaggctcctcatctatggtgcatccagcagggccactggcatcccagacaggttcagtggcagtgggtctgggacagacttcactctcaccatcagcagactggagcctgaagattttgcagtgtattactgtcagcagtatggtagctcacctcggacttttggccaggggaccaaggtggagatcaaacgtggaggcggtggctccggaggcggagggagcggagggggaggaagcgccgaggtgcagctggtgcagtctgggggaggcttggtaaagcctggggggtcccttagactctcctgtgcagcctctggattcactttcagtaacgcctggatgagctgggtccgccaggctccagggaaggggctggagtgggttggccgtattaaaagcaaaactgatggtgggacaacagactacgctgcacccgtgaaaggcagattcaccatctcaagagatgattcaaaaaacacgctgtatctgcaaatgaacagcctgaaaaccgaggacacagccgtgtattactgtaccacagagccgggtatagcagtggctggccttgggggctactggggccagggaaccctggtcaccgtctcctca

SEQ ID NO: 404 - DNA, 756 bp, Artificial Sequence
  scFv
gccgaggtgcagctggtggagtctgggggaggcttggtaaagcctggggggtcccttagactctcctgtgcagcctctggattcactttcagtaacgcctggatgagctgggtccgccaggctccagggaaggggctggagtgggttggccgtattaaaagcaaaactgatggtgggacaacagactacgctgcacccgtgaaaggcagattcaccatctcaagagatgattcaaaaaacacgctgtatctgcaaatgaacagcctgaaaaccgaggacacagccgtgtattactgtaccacagttactggtgttctccccaagggcggctactggggccagggaaccctggtcaccgtctcctcaggaggcggtggctccggaggcgggggtagtggaggcggagggagcggagggggaggaagcgaaacgacactcacgcagtctccaggcaccctgtctttgtctccaggggaaggagccaccctctcctgcagggccagtcagagtgttagtagtggcaacttagcctggtatcagcagaaacctggccagcctcccaggctcctcatctttggtgcatccagcagggccactggcatcccggacaggttcagtggcagtgggtctgggctagacttcactctcacaatcagcagactggagcctgaggattttgcagtgtattactgccaacaatatggcagttcacccatgtacagttttggccaggggaccaaggtggagatcaaacgt

SEQ ID NO: 405 - DNA, 753 bp, Artificial Sequence
  scFv
gacatcgtgatgacccagtctccatcctccctgtctgcatctgtaggagacagagtcaccatcacttgccgggcaagtcagaacattagcagctatttaaattggtatcagcagaaaccagggaaagcccctaaactcctgatctatgctgcatccactttgcaaagtggggtcccatcaaggttcagtggcagtggatctgggacagatttcactctcaccatcatcagtctgcaacctgaagattttgcaacttactactgtcaacagagttacagtacccctcgaacgctcactttcggcggagggaccaagctggagatcaaacgtggaggcggtggctccggaggcgggggtagtggaggcggagggagcggagggggaggaagcgccgaggtgcagctgttgcagtctgggggaggcttggtacagcctggagggtccatgagactctcctgtgcggcctctggattccccttcagtggttattatggattgaactgggtccgccgggctccaggaaaggggctggagtgggttgcatacattgctggtcgcgacagttccatatactacgcggactctgtgaggggccgcttcacagtctccagagacagcgacagggattcagtgtttctgcagatgaacagactgagagtcgacgacacggctgtttactactgtgcgacagatgggagtggccacttgggctttgactactggggccagggaaccctggtcaccgtctcctca

SEQ ID NO: 406 - DNA, 723 bp, Artificial Sequence
  scFv
gatgttgtgatgactcagtctccatcttccgtgtctgcatctgtaggagacagagtcaccatcacttgtcgggcgagtcagggtattagcagctggttagcctggtatcagcagagacctgggaaagcccctaagttcctgatctatgctgcatccagtttgcaaagtggggtcccatcaaggttcagcggcagtggctctgggacagatttcactctcaccatcagcagcctgcagcctgaagattttgcaacttactattgtcaacaggctaacagtttcccgatcaccttcggccaagggacacgactggagattaaacgtggaggcggtggctccggagggggaggaagcgcccaggtcaacttaagggagtctgggggaggcttggtacagcctggagggtccctgagactctcctgtgcagcctctcgattcaccttcagtagttatgaaatgaactgggtccgccaggctccagggaaggggctggagtgggtttcatacattagtagtagtggtactaccatgtactacgcagactctgtgaagggccgattcaccatctccagagacaacgccaagaactcactgtatctgcaaatgaacagcctgagagccgaggacacggctgtttattactgtgcgagagacggcatgcggttagtggatcggggtgcttttgatatctggggccaagggacaatggtcaccgtctcttca

SEQ ID NO: 407 - DNA, 786 bp, Artificial Sequence
  scFv
gaaattgtgctgactcagtctccatcctccctctctgcatctgttggagacagagtcaccatcacttgccgggcaagtcagagcatttccaccaatttaaattggtatcaacagaaaccagggaaagcccctaagctcctgatctatgctgcgtccagtttccaaagtggggtcccatcaaggttcagtggcagtggatctgggacagatttcactctcaccatcagcagtctgcaacctgaagattttgcaacttactactgtcaacagagttacaacacccctccgtacacttttggccaggggaccaaggtggagatcaaacgtggaggcggtggctccggcggtggtgggtccggtggcggcggatccggaggcgggggtagtggaggcggagggagcggagggggaggaagcgcccaggtgcagctggtgcagtctgggggaggcttggtacagcctggagggtccctgagactctcctgtgcagcctctcgattcaccttcagtagttatgaaatgaactgggtccgccaggctccagggaaggggctggagtgggtttcatacattagtagtagtggtactaccatgtactacgcagactctgtgaagggccgattcaccatctccagagacaacgccaagaactcactgtatctgcaaatgaacagcctgagagccgaggacacggctgtttattactgtgcgagagacggcatgcggttagtggatcggggtgcttttgatatctggggccaagggacaatggtcaccgtctcttca

SEQ ID NO: 408 - DNA, 741 bp, Artificial Sequence
  scFv
gacatcgtgatgacccagtctccaggcaccctgtctttgtctccaggggaaagagccaccctctcctgcagggccagtcagagtgttagcagcagctacttagcctggtaccagcagaaacctggccaggctcccaggctcctcatctatggtgcatccagcagggccactggcatcccagacaggttcagtggcagtgggtctgggacagacttcactctcaccatcagcagactggagcctgaagattttgcagtgtattactgtcagcagtatggtagctcaccttacacttttggccaggggaccaagctggagatcaaacgtggaggcggtggctccggagggggaggaagcgcccaggtgcagctggtgcagtctggggctgaggtgaagaagcctgggtcctcggtgaaggtctcctgcaaggcttctggaggcaccttcagcagatatgaaatcaactgggtgcggcaggcccctggacaagggcttgagtggatgggaaggatcatccctaaccttggtatagcaaactatgcacaggagctccagggcagagtcacgattatcgcggacaaatccacgagtacagcctacatggaattgagcagcctgagatctgacgacacggccgtctattactgtgcgagggggtctaagtggctggcaccccccccctcctactactactacggtatggacgtctggggccaagggaccacggtcaccgtctcctca

SEQ ID NO: 409 - DNA, 768 bp, Artificial Sequence
  scFv
gaaacgacactcacgcagtctccgtccatcctgtctgcatctgtaggagacagagtcaccttcacttgccgggccagtcagacaattagtaactggttggcctggtatcagcagaaaccagggaaagcccctaagctcctgatctataaggcgtctattttagaaactggggtcccatcaaggttcagcggcagtggctctgggacggaattcactctcaccatcagcagcgtgcagcctgatgattttgcaacttattactgccaacaatatagtgattacgttacttttggccaggggaccaaagtggatatcaaacgtggaggcggtggctccggcggtggtgggtccggtggcggcggatccggaggcgggggtagtggaggcggagggagcggagggggaggaagcgcccaggtgcagctgcaggagtctgggggaggcttggtacagcctggcaggtccctgagactctcctgtgcagcctctggattcacctttgatgaccatgccatgcactgggtccggcaagctccagggaagggcttggagtgggtctcaggaatttatcggaggggtggtgcggtaggctatgcggactctgtgaagggccgattcaccatctccagagacgacgccaagaattccctctatctggaaatgaacagtctgagacctgaggacacggccttgtattactgtggaagcgatcgctccccggggggtatggacgtctggggccaagggacaatggtcaccgtctcttca

SEQ ID NO: 410 - DNA, 801 bp, Artificial Sequence
  scFv
gacatcgtgatgacccagtctccaggcaccctgtctttgtctccaggggaaagagccaccctctcctgcagggccagtcagagtgttagcagcagctacttagcctggtaccagcagaaacctggccaggctcccaggctcctcatctatggtgcatccagcagggccactggcatcccagacaggttcagtggcagtgggtctgggacagacttcactctcaccatcagcagactggagcctgaagattttgcagtgtattactgtcagcagtatggtagctcaccgcccctgtacacttttggccaggggaccaagctggagatcaaacgtggaggcggtggctccggcggtggtgggtccggtggcggcggatccggaggcgggggtagtggaggcggagggagcggagggggaggaagcgcccaggtgcagctggtgcagtctggggctgaggtgaagaagcctggggcctcagtgacggtttcctgcaaggcatctggataccccttcctcagtcactatgtccactgggtgcgacaggcccctggacaagggcttgagtggatgggaataatcgacgctcgtggtggtggcacaagttaccccctggaattccagggcagagtcaccatgaccagggacacgtccacgaacacagtgttcctgaaactgaccaacctgagatctactgacacggccgtctattattgtgcgagagatcccgtcggatatggtggtaaccccggtggcccctatcttgacctttggggccagggaaccctggtcaccgtctcctca

SEQ ID NO: 411 - DNA, 738 bp, Artificial Sequence
  scFv
gaaattgtgttgacgcagtctccagccaccctgtctgtgtctccaggggaaggagccgccctctcctgcagggccagtcagagtgttagcagtaatgtggcctggtaccagcagaaacctggccaggctcccaggctcctcatctatggtgcatccaccagggccactggtgtcccagccaggttccgtggcggtggggctgggacagacttcactctcaccatcagcagcctgcagtctgaagatgttggtacttattactgtcagcagtatactcggggcagggaaagttattttggccaggggaccaaagtggatatcaaacgtggaggcggtggctccggaggcggagggagcggagggggaggaagcgcccaggtgcagctgcaggagtcggggggcggcgtggtccagcctggggggtccctgagactctcctgtgcagcctctggattcaccttcagtaaatatggcatgcactgggtccgccaggctccaggcaagggactggaatgggtggcagttgtctcatataatggaggtaatgatttctatgcagactccgtgaagggccgattcaccatttccagagacaattcaaagaacacgctggatttgcaaatggacagtctgaaagctgaggacacggctttatatttctgtgcgaaagatcagggaggctattacttttacggcatggacgtctggggccaggggaccacggtcaccgtctcctca

SEQ ID NO: 412 - DNA, 720 bp, Artificial Sequence
  scFv
gacatcgtgatgacccagtctccaggcatcctgtctttgtctccaggggaaagagccaccctctcctgcagggccagtcagagcgttaacagaaggtacttggcctggtatcagcagaagcctggccaggctcccagcctcctcatctatggtgcatccaatagggccactggcgtcccagacaggttcagtggcagtgggtctgggacagacttcactctcaccatcagcagactggagcctgaagattttgcagtgtattactgtcagcaatatggtggctcaccggggtacacttttggccaggggaccaagctggagatcaaacgtggaggcagctcccggtcaagcgcccaggtgcagctgcaggagtctgggggaggcttggtacagcctggcaggtccctgagactctcctgtgcagcctctggattcacctttgatgattatgccatgcactgggtccggcaagctccagggaagggcctggagtgggtctcaggtattagttggaatagtggtagcataggctatgcggactctgtgaagggccgattcaccatctccagagacaacgccaagaactccctgtatctgcaaatgaacagtctgagagctgaggacacggccttgtattactgtgcaaagggccagagctccttcctcccccgaggcggtatggacgtctggggccaagggaccacggtcaccgtctcctca

SEQ ID NO: 413 - DNA, 768 bp, Artificial Sequence
  scFv
gaaattgtgttgacgcagtctccatcttccctgtctgcatctgtgggggacagagtcaccatttcctgccgggcaggtcagggaattggatcctatttaaattggtatcagcagagaccagggaaggcccctaacctcctgatctctggtggaaccgatttgcaaagtggggtcccatcaaggttcagtggcagtgaatctgggacggacttcactctcaccatcagtagtctgcaacctgaggattttgcaacctacttctgtcaacagagctacagttcccctccgacgttcggccaggggaccaagctggaaatcaaacgtggaggcggtggctccggtggcggcggatccggaggcgggggtagtggaggcggagggagcggagggggaggaagcgccgaggtacagctgcagcagtctgggggaggcttggtaaagcctggggggtcccttagactctcctgtgcagcctctggattcactttcagtaacgcctggatgagctgggtccgccaggctccagggaaggggctggagtgggttggccgtattaaaagcaaaactgatggtgggacaacagactacgctgcacccgtgaaaggcagattcaccatctcaagagatgattcaaaaaacacgctgtatctgcaaatgaacagcctgaaaaccgaggacacagccgtgtattactgtaccacaggtcccgacgtattacgattggcaggtggctactggggccagggaaccctggtcaccgtctcctca

SEQ ID NO: 414 - DNA, 762 bp, Artificial Sequence
  scFv
gaaattgtgttgacgcagtctccatcttccgtgtctgcttctgtgggagacagagtcactatcacttgtcgggcgagtcagggtattagcagctggttagcctggtatcagcagaaaccagggaaagcccctaaactcctgatctatgctacatccagtttagagagtggggtcccatcaaggttcagcggcagtggatctgggacagatttcactctcaccatcagcaacctgcagcctgaagattttgcaacttactattgtcaacaggctaacagtttccccctcactttcggcggagggaccaaggtggagatcaaacgtggaggcggtggctccggaggcgggggtagtggaggcggagggagcggagggggaggaagcgccgaggtgcagctgttgcagtctgggggaggcttggtagagcctggcaggtccctgagactctcctgtgcaggctctggattcacctttggtgattatgccatgcactgggtccggcaagctccagggaagggcctggagtgggtctcaggcattagttggaatagtgatagcataggccaagcggactctgtgaagggccgattcaccatctcccgagacaacgccaagaactccctgtatctgcagatgaacagtctgagagctgaggacgcggccctgtattactgtgcaaaagataccacgggttattactatggtttggggaggcgcgctatggacgtctggggccaagggacaatggtcaccgtctcctca

SEQ ID NO: 415 - DNA, 729 bp, Artificial Sequence
  scFv
gacatcgtgatgacccagtctccttccaccctgtctgcatctgtaggagacagagtcctgatcacttgccgggccagtcagagtattggtagttggttggcctggtatcagcagaaaccagggagagcccctaaactcctgatctatgaggcgtctggtttacaaagtggggtcccatcaaggttcagcggcagtggatctgggacacaattcactctcgccatcagcagcctgcaggctgatgattttgcaacttattactgccaacatcgggaaattttcggcggagggaccaagctggagatcaaacgtggaggcggtggctccggaggcggagggagcggagggggaggaagcgccgaggtgcagctggtgcagtctgggggaggcttggtacagcctggcaggtccctgagactctcctgtgcagcctctggattcacctttgatgattatgccatgcactgggtccggcaagctccagggaagggcctggagtgggtctcaggtattagttggaatagtggtagcataggctatgcggactctgtgaagggccgattcaccatctccagagacaacgccaagaactccctgtatctgcaaatgaacagtctgagagctgaggacacggccttgtattactgtgcaaaagatatgagtgagtggctggtacgaggagatgcttttgatatctggggccaagggacaatggtcaccgtctcttca

SEQ ID NO: 416 - DNA, 798 bp, Artificial Sequence
  scFv
gacatcgtgatgacccagtctccatcctccctgtccgcatctgtaggagacagagtcaccatcacttgccgggcaagtcagagtattagcagctatttaaattggtatcagcagaaaccaggaaaagcccctaagctcctgatctatgctgcatccagtttgcaaagtggggtcccatcacggtttagtggcagtggatctgggacagatttcactctcaccatcagcagtctgcaacctgaagattttgcaacttactactgtcaacagagttacagtaggcctcctacgttcggccaagggaccaagctggaaatcaaacgtggaggcggtggctccggcggtggtgggtccggtggcggcggatccggaggcgggggtagtggaggcggagggagcggagggggaggaagcgcccaggtgcagctgcaggagtcggggggaggcgtggtccagcctgggaggtccctgagactctcctgtgcagcctctggattcaccttcagtagctatgctatgcactgggtccgccaggctccaggcaaggggctggagtgggtggcagttatatcatatgatggaagcaataaatactacgcagactccgtgaagggccgattcaccatctccagagacaattccaagaacacgctgtatctgcaaatgaacagcctgagagctgaggacacggctgtgtattactgtgcgagtctaggggggtattgtactggtggtgtatgcgatgccccattaccccttgactactggggccagggaaccctggtcaccgtctcctca

SEQ ID NO: 417 - DNA, 741 bp, Artificial Sequence
  scFv
gccgaggtgcagctggtggagtctgggggaggcttggtccagcctggggggtccctgagactctcctgttcagcctctggattcaccttcagtaactatgctatgcactgggtccgccaggctccagggaagggactggagtatgtttcagctattactagtaatgggggtagcacatactacgcagactccgtgaggggcagattcaccatctccagagacaattccaagaacacactatatcttcaattgagcagtctgagagctgaggacacgggtctgtattactgtgtgaaagacgaagggggccctacggtgactacgggtccctttgactactggggccagggcaccctggtcaccgtctcctcaggaggcggtggctccggaggcggagggagcggagggggaggaagcgaaacgacactcacgcagtctccatcttccctgtctgcatctgtaggagacagagtcaccatcacttgccaggcgagtcaggacattaggcactatttaagttggtttcagcagaaaccagggaaagcccctaaggccctgatctacgaagcgtccaatttggaaacaggcgtcccatcaagattcagtggaagtggatctgggacagattttactttcaccatcagcaacctgcagccacaagatgttgcaacatattactgtcaacaggctgataagctccccctcactttcggcggagggaccaagctggaaatcaaacgt

SEQ ID NO: 418 - DNA, 774 bp, Artificial Sequence; identical to SEQ ID NO: 376
  scFv

SEQ ID NO: 419 - DNA, 750 bp, Artificial Sequence; identical to SEQ ID NO: 377
  scFv

SEQ ID NO: 420 - DNA, 750 bp, Artificial Sequence
  scFv
gaaattgtgctgactcagtctccatcctccctctctgcatctgtaggagacagagtcaccatcacttgccgggcaagtcagagcattagcaggtatgtcaattggtatcagcaaaaaccagggaaagcccttacgctcctgatctatgctgcatccagtttgcaaagtggggtcccatcaaggttcagtggcagtggatctgggacagatttcactctcaccatcagcagtctgcaacctgaagattttgcaacttactactgtcagcagagatacagtattccctacgatttcggccctgggacacgactggagattaaacgtggaggcggtggctccggaggcgggggtagtggaggcggagggagcggagggggaggaagcgccgaggtgcagctgttgcagtctggagcagaggtgaaaaagcccggggagtctctgaagatctcttgtaaggtttctggatacagcttttccagctactggatcggctgggtgcgccagatgcccgggaaaggcctggaatggatggggatcatctatcctggtgactccaataccagatacagcccgtccttacacggccaggtctccttctcggccgacaagtccatcagcaccgcctacctgcagtggagcagcctgaaggcctcggacaccgccatgtattactgtgcgaggcttatctatggtgactacggtgggggtcttgactactggggccagggaaccctggtcaccgtctcctca

SEQ ID NO: 421 - DNA, 744 bp, Artificial Sequence; identical to SEQ ID NO: 378
  scFv

SEQ ID NO: 422 - DNA, 744 bp, Artificial Sequence
  scFv
gacatccagatgacccagtctccatcctccctgtctgcatctgtaggagacagagtcaccatcacttgccgggcaagtcagagcattagcagctatttaaattggtatcagcagaaaccagggaaagcccctaagctcctgatctatgctgcatccagtttgcaaagtggggtcccatcaaggttcagtggcagtggatctgggacagatttcactctcaccatcagcagtctgcaacctgaagattttgcaacttactactgtcaacagagttacagtacccgtccgtacacttttggccaggggaccaaggtggagatcaaacgtggaggcggtggctccggaggcgggggtagtggaggcggagggagcggagggggaggaagcgccgaggtacagctgcagcagtcaggggctgaggtgaagaagcctgggtcctcggtgaaggtctcctgcaaggcttctggaggcaccttcagcagctatgctatcagctgggtgcgacaggcccctggacaagggcttgagtggatgggagggatcatccctatctttggtacagcaaactacgcacagaagttccagggcagagtcacgattaccgcggacgaatccacgagcacagcctacatggagctgagcagcctgagatctgaggacacggccgtgtattactgtgcgagggtgtatagcagtggctggtttgactactggggccagggaaccctggtcaccgtctcctca

SEQ ID NO: 423 - DNA, 786 bp, Artificial Sequence
  scFv
gacatcgtgatgacccagtctccatcctccctgtctgcatctgtaggagacagagtcaccatcacttgccgggcaagtcagagcattagcagctatttaaattggtatcagcagaaaccagggaaagcccctaagctcctgatctatgctgcatccagtttgcaaagtggggtcccatcaaggttcagtggcagtggatctgggacagatttcactctcaccatcagcagtctgcaacctgaagattttgcaacttactactgtcaacagagttacagtaccccgctcactttcggcggagggaccaagctggaaatcaaacgtggaggcggtggctccggcggtggtgggtccggtggcggcggatccggaggcgggggtagtggaggcggagggagcggagggggaggaagcgcccaggtgcagctggtgcagtcaggtccaggactggtgaagccctcgcagaccctctcactcacctgtgccatctccggggacagtgtctctagcaacagtgctgcttggaactggatcaggcagtccccatcgagaggccttgagtggctgggaaggacatactacaggtccaagtggtataatgattatgcagtatctgtgaaaagtcgaataaccatcaacccagacacatccaagaaccagttctccctgcagctgaactctgtgactcccgaggacacggctgtgtattactgtgcaagattggggtatagcagcagctggccgtttgactactggggccagggaaccctggtcaccgtctcctca

SEQ ID NO: 424 - DNA, 735 bp, Artificial Sequence
  scFv
gaaacgacactcacgcagtctccatcctccctgtctgcatctgtaggagacagagtcaccatcacttgccgggcaagtcagagcattagcagctatttaaattggtatcagcagaaaccagggaaagcccctaagctcctgatctatgctgcatccagtttgcaaagtggggtcccatcaaggttcagtggcagtggatctgggacagatttcactctcaccatcagcagtctgcaacctgaagattttgcaacttactactgtcaacagagttacagtaccccgtacacttttggccaggggaccaagctggagatcaaacgtggaggcggtggctccggaggcgggggtagtggaggcggagggagcggagggggaggaagcgcccaggtgcagctgcaggagtcgggcccaggactggtgaagccttcggagaccctgtccctcacctgcactgtctctggttactccatcaccagtcgttcctactggggctgggtccggcagtccccagggaaggggctggaatggcttgggagtttgtcctggactggaagtactcaatacaacccgtccctcaggggtcgagtcacaatatcactggacaggtccaacagtcaattctccctgaggttgacctctgtgtccgccgccgacacggccacttactactgtgtgagagataatagagcccttgactcctggggccagggaaccctggtcaccgtctcctca

SEQ ID NO: 425 - DNA, 774 bp, Artificial Sequence; identical to SEQ ID NO: 383
  scFv

SEQ ID NO: 426 - DNA, 765 bp, Artificial Sequence
  scFv
gacatccagatgacccagtctccatcctccctgtctgcatctgtaggagacagagtcaccatcacttgccgggcaagtcagggcattagcagtgctttagcctggtatcagcagaaaccagggaaagctcctaagctcctgatctatgatgcctccagtttgcaaagtggggtcccatcaaggttcagtggcagtggatctgggacagatttcactctcaccatcagcagtctgcaacctgaagattttgcaacttactactgtcaacagagttacattacccctcacacttttggccaggggaccaagctggaaatcaaacgtggaggcggtggctccggaggcgggggtagtggaggcggagggagcggagggggaggaagcgcccaggtcaacttaagggagtctgggggaggcttggtccagcctggggggtccctgagactctcctgtgcagcctctggattcacctttagtagctattggatgagctgggtccgccaggctccagggaaggggctggagtgggtggccaacataaagcaagatggaagtgagaaatactatgtggactctgtgaagggccgattcaccatctccagagacaacgccaagaactcactgtatctgcaaatgaacagcctgagagccgaggacacggctgtgtattactgtgcgagagcggtgggcgatagcagtggctggtaccaagactattacggtatggacgtctggggccaagggacaatggtcaccgtctcttca

SEQ ID NO: 427 - DNA, 723 bp, Artificial Sequence; identical to SEQ ID NO: 385
  scFv

SEQ ID NO: 428 - DNA, 747 bp, Artificial Sequence
  scFv
gatgttgtgatgactcagtctccatcctccctgtctgcatctgtaggagacagagtcaccatcacttgccgggcaagtcagagcattagcagctatttaaattggtatcagcagaaaccagggaaagcccctaagctcctgatctatgctgcatccagtatgcaaagtggggtcccatcaaggttcagtggcagtggatctgggacagatttcactctcaccatcagcagtctgcaacctgaagattttgcaacttactactgtcaacagagttacagtacccgtatgtacacttttggccaggggaccaaggtggagatcaaacgtggaggcggtggctccggaggcgggggtagtggaggcggagggagcggagggggaggaagcgccgaggtgcagctggtggagtctgggggaggcttggtacagcctggcaggtccctgagactctcctgtgcagcctctggattcacctttgatgattatgccatgcactgggtccggcaagctccagggaagggcctggagtgggtctcaggtattagttggaatagtggtagcataggctatgcggactctgtgaagggccgattcaccatctccagagacaacgccaagaactccctgtatctgcaaatgaacagtctgagagctgaggacacggccttgtattactgtgcaaaagatttcacaggggataatgcttttgatatctggggccaagggacaatggtcaccgtctcttca

SEQ ID NO: 429 - DNA, 741 bp, Artificial Sequence
  scFv
gatgttgtgatgactcagtctccatcctccctgtccgcatctgtaggagacagagtcaccatcacttgccgggcaagtcagagtattagcagctatttaaattggtatcagcagaaaccagggaaagcccctaagctcctgatctatgctgcatccagtttgcaaagtggggtcccatcacggtttagtggcagtggatctgggacagatttcactctcaccatcagcagtctgcaacctgaagattttgcaacttactactgtcaacagagttacagtaggcctcctacgttcggccaagggaccaaagtggatatcaaacgtggaggcggtggctccggaggcggagggagcggagggggaggaagcgccgaggtacagctgcagcagtcaggtccaggactggtgaagccctcgcagaccctctcactcacctgcgccatctccggggacagtgtcactgacaacagtgctgcttggaactggatcaggcagtccccatcgagaggcctggagtggctgggaaggacatactacaggttcaagtggtataatgaatatgcagaatctgtgaaaagtcgaataggcatcaatccagacatatccaagaaccagttctccctgcagctgagctctgtgactcccgaggacacggctgtgtattactgtgtaagaggggggacccggtcctatagcgactttgactactggggccagggaaccctggtcaccgtctcctca

SEQ ID NO: 430 - DNA, 747 bp, Artificial Sequence
  scFv
gaaattgtgctgactcagtctccatcctccctgtccgcatctgtaggagacagagtcaccatcacttgccgggcaagtcagagtattagcagctatttaaattggtatcagcagaaaccagggaaagcccctaagctcctgatctatgctgcatccagtttgcaaagtggggtcccatcacggtttagtggcagtggatctgggacagatttcactctcaccatcagcagtctgcaacctgaagattttgcaacttactactgtcaacagagttacagtaggcctcctacgttcggccaagggaccaaagtggatatcaaacgtggaggcggtggctccggaggcgggggtagtggaggcggagggagcggagggggaggaagcgcccaggtgcagctggtgcagtctggggctgaggtgaagaagcctggggcctcagtgaaggtttcctgcaaggcatctggatacaccttcaccagctactatatgcactgggtgcgacaggcccctggacaagggcttgagtggatgggaataatcaaccctagtggtggtagcacaagctacgcacagaagttccagggcagagtcaccatgaccagggacacgtccacgagcacagtctacatggagctgagcagcctgagatctgaggacacggccgtgtattactgtgcgagagccgcaccggagttccgtggtgcttttgatatctggggccaagggacaatggtcaccgtctcttca

SEQ ID NO: 431 - DNA, 756 bp, Artificial Sequence; identical to SEQ ID NO: 399
  scFv

SEQ ID NO: 432 - DNA, 756 bp, Artificial Sequence
  scFv
gacatccagatgacccagtctccttccaccctgtcagcatctgtaggagacagagtcaccatcacttgccgcgccagtcagagtattagtacctggttggcctggtatcaacaaaaaccagtgaaagcccctaacctcctgatctataaggcgtctactttaaaaagtggggtcccatcaaggttcagcggcagtggatctgggacagaattcactctcaccatcagcagcctgcagcctgatgattttgcaacttattactgccaacagtatgatagttccccgtacacttttggccaggggaccaagctggaaatcaaacgtggaggcggtggctccggaggcgggggtagtggaggcggagggagcggagggggaggaagcgccgaggtgcagctggtggagtctgggggaggcttggtacagcctggcaggtccctgagactctcctgtgcagcctctggattcacctttgatgattatgccatgcactgggtccggcaagctccagggaagggcctggagtgggtctcaggtattagttggaatagtggtagcataggctatgcggactctgtgaagggccgattcaccatctccagagacaacgccaagaactccctgtatctgcaaatgaacagtctgagagctgaggacacggccttgtattactgtgcaaaagatatctcccctgactggagcagggggggatggttcgacccctggggccagggcaccctggtcaccgtctcctca

SEQ ID NO: 433 - DNA, 756 bp, Artificial Sequence
  scFv
gacatccagatgacccagtctccttccaccctgtcagcatctgtaggagacagagtcaccatcacttgccgggccagtcagagtattagtacctggttggcctggtatcaacaacaaccagggaaagcccctaacctcctgatctataaggcgtctactttaaaaagtggggtcccatcaaggttcagcggcagtggatctgggacagaattcactctcaccatcagcagcctgcagcctgatgattttgcaacttattactgccaacagtatgatagttccccgtacacttttggccaggggaccaagctggaaatcaaacgtggaggcggtggctccggaggcgggggtagtggaggcggagggagcggagggggaggaagcgccgaggtgcagctggtggagtctgggggaggcttggtacagcctggcaggtccctgagactctcctgtgcagcctctggattcacctttgatgattatgccatgcactgggtccggcaagctccagggaagggcctggagtgggtctcaggtattagttggaatagtggtagcataggctatgcggactctgtgaagggccgattcaccatctccagagacaacgccaagaactccctgtatctgcaaatgaacagtctgagagctgaggacacggccttgtattactgtgcaaaagatatctcccctgactggagcagggggggatggttcgacccctggggccagggcaccctggtcaccgtctcctca

SEQ ID NO: 434 - DNA, 753 bp, Artificial Sequence; identical to SEQ ID NO: 405
  scFv

SEQ ID NO: 435 - DNA, 753 bp, Artificial Sequence
  scFv
  misc_feature (15)..(15): n is a, c, g, or t
gacatcgtgatgacncagtctccatcctccctgtgtgcatctgtaggagacagagtcaccatcacttgccggtcaagtcagaacattagcagatatttaacttggtatcagcagaaaccagggatagcccgtaaactcctgatgtatgttgcatccactttgcaaagtggggtcccatcaaggttcagtggcagtggatctgggacagatttcactctcaccatcatcagtctgcaacctgaagattttgcaacttactactgtcaacagagttacagtacccctcgaacgctcactttcggcggagggaccaagctggagatcaaacgtggaggcggtggctccggaggcgggggtagtggaggcggagggagcggagggggaggaagcgccgaggtgcagctgttgcagtctgggggaggcttggtacagcctggagggtccatgagactctcctgtgcggcctctggattccccttcagtggttattatggattgaactgggtccgccgggctccaggaaaggggctggagtgggttgcatacattgctggtcgcgacagttccatatactacgcggactctgtgaggggccgcttcacagtctccagagacagcgacagggattcagtgtttctgcagatgaacagactgagagtcgacgacacggctgtttactactgtgcgacagatgggagtggccacttgggctttgactactggggccagggaaccctggtcaccgtctcctca

SEQ ID NO: 436 - DNA, 768 bp, Artificial Sequence
  scFv
gaaaggacactcacgcagtctccgttcatcctgtctgcatctgtaggagacagagtcaccttcacttgccgggccagtcagacaattagtaactggttggcctggtatcagcagaaaccagggaaagcccctaagctcctgatctataaggcgtctattttagaaactggggtcccatcaaggttcagcggcagtggctctgggacggaattcactctcaccatcagcagcgtgcagcctgatgattttgcaacttattactgccaacaatatagtgattacgttacttttggccaggggaccaaagtggatatcaaacgtggaggcggtggctccggcggtggtgggtccggtggcggcggatccggaggcgggggtagtggaggcggagggagcggagggggaggaagcgcccaggtgcagctgcaggagtctgggggaggcttggtacagcctggcaggtccctgagactctcctgtgcagcctctggattcacctttgatgaccatgccatgcactgggtccggcaagctccagggaagggcttggagtgggtctcaggaatttatcggaggggtggtgcggtaggctatgcggactctgtgaagggccgattcaccatctccagagacgacgccaagaattccctttatctggaaatgaacagtatgagacctgaggacacggccttgtattactgtggaagcgatcgctccccggggggtatggacgtctggggccaagggacaatggtcaccgtctcctca

SEQ ID NO: 437 - protein, 258 aa, Artificial Sequence
  scFv
DVVMTQSPSSLSASVGDRVTITCRASQSISSYLNWYQQKPGKAPKLLIYAASSLQSGVPSRFSGSGSGTDFTLTISSLQPEDFATYYCQQSYSRPPTFGQGTKLEIKRGGGGSGGGGSGGGGSGGGGSAQVQLQESGGGLVQPGGSLRLSCAASGFTFSSYSMNWVRQAPGKGLEWVSSISSRSNDIYYADSVKGRFTISRDNAKNSLYLQMNSLRAEDTAVYYCARPYYFDSSGYVNYYSYYGLDVWGQGTTVTVSS

SEQ ID NO: 438 - protein, 250 aa, Artificial Sequence
  scFv
EIVLTQSPSSLSASVGDRVTITCRASQSISRYLNWYQQKPGKAPKLLIYAASSLQSGVPSRFSGSGSGTDFTLTISSLQPEDFATYYCQQRYSIPYDFGPGTRLEIKRGGGGSGGGGSGGGGSGGGGSAEVQLLQSGAEVKKPGESLKISCKVSGYSFSSYWIGWVRQMPGKGLEWMGIIYPGDSNTRYSPSFQGQVSFSADKSISTAYLQWSSLKASDTAMYYCARLIYGDYGGGLDYWGQGTLVTVSS

SEQ ID NO: 439 - protein, 248 aa, Artificial Sequence
  scFv
EIVLTQSPSSLSASVGDRVTITCRASQSISSYLNWYQQKPGKAPKLLIYAASSLQSGVPSRFSGSGSGTDFTLTISSLQPEDFATYYCQQSYSTRPWTFGQGTKLEIKRGGGGSGGGGSGGGGSGGGGSAEVQLLQSGAEVKKPGSSVKVSCKASGGTFSSYAISWVRQAPGQGLEWMGGIIPIFGTANYAQKFQGRVTITADESTSTAYMELSSLRSEDTAVYYCARVYSSGWFDYWGQGTLVTVSS

SEQ ID NO: 440 - protein, 251 aa, Artificial Sequence
  scFv
DIVMTQSPSFLSASVGDRVTITCRANQGISSFLAWYQQKPGKAPKLLINAASTLQSGVPSRFSGSGSGTQFTLTISSLQPEDFATYYCQQHSSYPLTFGGGTKVEIKRGGGGSGGGGSGGGGSGGGGSGGGGSAEVQLLQSGAEVKKPGESLRISCKGSGYSFTSYWIAWVRQMPGKGLEWMGIIYPGESDIRYSPSFQGQVTISADKSISTAYLQWSSLKASDTAMYYCARQRYWYFDLWGRGTLVTVSS

SEQ ID NO: 441 - protein, 243 aa, Artificial Sequence
  scFv
DIQMTQSPLSLPVTPGEPASISCRSSQSLLHSNGYNYLDWYLQKPGQSPQLLIYLGSNRASGVPDRFSGSGSGTDFTLKISRVEAEDVGVYYCMQALQTSTYSFGQGTKLEIKRGGSSRSSAQVQLVQSGPGLVKPSETLSLTCAVSGDSIRGHYWSWIRQTAGKGLEWIGYTSDTGDTKYNPSLGSRVTMSLDTSKNQLSLNLRSVTATDTALYYCARVDPEDPSGALLDLWGQGTLVTVSS

SEQ ID NO: 442 - protein, 247 aa, Artificial Sequence
  scFv
DIQMTQSPSSLSASVGDRVTITCRASQSISSYLNWYQQKPGKAPKLLIYAASSLQSGVPSRFSGSGSGTDFTLTISSLQPEDFATYYCQQSYSRPPTFGQGTKLEIKRGGGGSGGGGSGGGGSGGGGSAQVQLVQSGAEVKKPGASVKVSCKASGYTFTSYYMHWVRQAPGQGLEWMGIINPSGGSTSYAQKFQGRVTMTRDTSTSTVYMELSSLRSEDTAVYYCARSKGKGPFDYWGQGTLVTVSS

SEQ ID NO: 443 - protein, 260 aa, Artificial Sequence
  scFv
DVVMTQSPLSLPVTPGEPASISCRSSQSLLHSNGYNYLDWYLQKPGQSPQLLIYLGSNRASGVPDRFSGSGSGTDFTLKISRVEAEDVGVYYCMQALQTPYTFGQGTKLEIKRGGGGSGGGGSGGGGSGGGGSGGGGSGGGGSAQVQLQESGPGLVKPSETLSLTCTVSGYSITSRSYWGWVRQSPGKGLEWLGSLSWTGSTQYNPSLRGRVTISLDRSNSQFSLRLTSVSAADTATYYCVRDNRALDSWGQGTLVTVSS

SEQ ID NO: 444 - protein, 258 aa, Artificial Sequence
  scFv
EIVLTQSPGTLSLSPGERATLSCRASQSVSSSYLAWYQQKPGQAPRLLIYGASSRATGIPDRFSGSGSGTDFTLTISRLEPEDFAVYYCQQYGSSPGVYTFGQGTKVDIKRGGGGSGGGGSGGGGSGGGGSGGGGSGGGGSAQVQLQESGPGLVKPSETLSLTCTVSGYSITSRSYWGWVRQSPGKGLEWLGSLSWTGSTQYNPSLRGRVTISLDRSNSQFSLRLTSVSAADTATYYCVRDNRALDSWGQGTLVTVSS

SEQ ID NO: 445 - protein, 255 aa, Artificial Sequence
  scFv
DIQMTQSPSSLSASVGDRVTITCRASQGISSALAWYQQKPGKAPKLLIYDASSLQSGVPSRFSGSGSGTDFTLTISSLQPEDFATYYCQQSYITPHTFGQGTKLEIKRGGGGSGGGGSGGGGSGGGGSAQVNLRESGGGLVQPGGSLRLSCAASGFTFSSYWMSWVRQAPGKGLEWVANIKQDGSEKYYVDSVKGRFTISRDNAKNSLYLQMNSLRAEDTAVYYCARAVGDSSGWYQDYYGMDVWGQGTMVTVSS

SEQ ID NO: 446 - protein, 241 aa, Artificial Sequence
  scFv
DVVMTQSPSSVSASVGDRVTITCRASQGISSWLAWYQQKPGKAPKLLIYAASSLQSGVPSRFSGSGSGTDFTLTISSLQPEDFATYYCQQANSFPLTFGGGTKLEIKRGGGGSGGGGSGGGGSAEVQLVESGGGLVQPGGSLRLSCAASGFTFAHDAMSWVRQAPGKGLEWVSTITYGGGGTYYADSVKGRFTISRDNSKNTLFLQMNGLRAEDTAVYSCARGGVGAFDSWGQGTLVTVSS

SEQ ID NO: 447 - protein, 266 aa, Artificial Sequence
  scFv
DIVMTQSPLSLPVTPGEPASISCRSSQSLLHSNGYNYLDWYLQKPGQSPQLLIYLGSNRASGVPDRFSGSGSGTDFTLKISRVQAEDVGVYFCMQALQTPPTFGGGTKLEIKRGGGGSGGGGSGGGGSGGGGSGGGGSGGGGSAQVQLQESGGGVVQPGRSLTLSCAASGFTFSSYPMHWVRQAPGKGLEWVAVISHDESNKYYADSVKGRFTISRDNSKNTLYLQMNSLRAEDTAVYYCARERGGGYSYGIGDYWGQGTLVTVSS

SEQ ID NO: 448 - protein, 247 aa, Artificial Sequence
  scFv
EIVLTQSPSTLSASVGDRVTITCRASQSISSWLAWYQQKPGKAPKLLIYKASTLESGVPSRFSGSGSGTEFTLTISSLQPDDFASYYCQQYHTYWTFGPGTKVDIKRGGGGSGGGGSGGGGSGGGGSAEVQLVESGPGLVKPSQTLSLTCTVSGGSISSGGYYWSWIRQHPGKGLEWIGYIYYSGSTYYNPSLKSRVTISVDTSKNQFSLKLSSVTAADTAVYYCARDRSERAFDIWGQGTMVTVSS

SEQ ID NO: 449 - protein, 242 aa, Artificial Sequence
  scFv
DVVMTQSPSSLSASVGDRVTITCRASQTIRNYLNWYQHKPGKAPKLLIYAASSLQSGVPSRFSGSGSGTDFTLTISSLQPEDFATYYCQQSYSTPITFGRGTRLEIKRGGGGSGGGGSGGGGSAEVQLLQSGAEVKEPGASVKVSCKASGYTFTGNYIHWVRQAPGQGLQWMGWINPNTDGTRYSPNFQGRLTFTRDTSINTAYLELNRLTSDDTAVYYCARDTTGNAFHIWGQGTMVTVSS

SEQ ID NO: 450 - protein, 245 aa, Artificial Sequence
  scFv
AEVQLLQSGGGLIQPGGSLRLSCAASGFTVSSNYMSWVRQAPGKGLEWVSVIYSGGSTYYADSVKGRFTISRDNSKNTLYLQMNSLRAEDTAVYYCARDQPGARFDPWGQGTLVTVSSGGGGSGGGGSGGGGSEIVLTQSPSSLSASVGDRVTIACRASQSISGYLNWYQQKPGKAPKLLIYAASSLQSGVPSRFSGSGSGTDFTLTISSLQPEDFATYYCQQSYSSPQLPMYTFGQGTKLEIKR

SEQ ID NO: 451 - protein, 253 aa, Artificial Sequence
  scFv
DVVMTQSPGTLSLSPGERATLSCRASQSVSGSYLAWYQQKPGRAPRLLIYGASSRATGIPDRFSGSGSGTDFTLTISRLEPEDFAVYYCQHYGSSPLTFGGGTKVEIKRGGGGSGGGGSGGGGSGGGGSGGGGSAEVQLVESGGGLVQPGGSLRLSCAASGFTFSSYAMSWVRQAPGKGLEWVSAISGSGGSTYYADSVKGRFTISRDNSKNTLYLQMNSLRAEDTAVYYCAKDPEMATIHYWGQGTLVTVSS

SEQ ID NO: 452 - protein, 252 aa, Artificial Sequence
  scFv
EIVLTQSPGTLSLSPGERAILSCRASQSVSSSYLAWYQQKPGQAPRLLIFGASTRATGVPDRFSGSGSGTDFTLTISRLEPEDLAVYYCQQYGSSPMYTFGQGTKLEIKRGGGGSGGGGSGGGGSGGGGSAEVQLVESGGGVVQPGRSLRLSCAASGFTFSSYAMHWVRQAPGKGLEWVAVISYDGSNKYYADSVKGRFTISRDNSKNTLYLQMNSLRAEDTAVYYCARSDGYSYPRHFDYWGQGTLVTVSS

SEQ ID NO: 453 - protein, 258 aa, Artificial Sequence
  scFv
EIVLTQSPSSLSASVGDRVTITCRASPRIGNDLGWYQQKPGKAPERLIYAASSLQSGVPSRFSGSGSGTEFTLTISSLQPEDFATYYCLQHNNYPYTFGQGTKVDIKRGGGGSGGGGSGGGGSGGGGSGGGGSGGGGSAEVQLVQSGAEVKKPGESLKISCKGSGYSFTSYWIGWVRQMPGKGLEWMGIIYPGDSDTRYSPSFQGQVTISADKSISTAYLQWSSLKASDTAMYYCARQPGWGGPFDPWGQGTLVTVSS

SEQ ID NO: 454 - protein, 238 aa, Artificial Sequence
  scFv
DIVMTQSPSSVSASVGDRVTITCRASQGISSWLAWYQQKPGKAPKLLIYAASSLQSGVPSRFSGSGSGTDFTLTISSLQPEDFATYYCQQANSFPYTFGQGTKLEIKRGGGGSGGGGSAEVQLLQSGAEVKKPGESLKISCKGSGYSFTSYWIGWVRQMPGKGLEWMGIIYPGDSDTRYSPSFQGQVTISADKSISTAYLQWSSLKASDTAMYYCARQPGWGGPFDPWGQGTLVTVSS

SEQ ID NO: 455 - protein, 258 aa, Artificial Sequence
  scFv
EIVLTQSPSSLSASVGDRVTITCRASPGIGNDLGWYQQKPGKAPERLIYAASSLQSGVPSRFSGSGSGTEFTLTISSLQPEDFATYYCLQHNNYPYTFGQGTKVDIKRGGGGSGGGGSGGGGSGGGGSGGGGSGGGGSAEVQLVQSGAEVKKPGESLKISCKGSGYSFTSYWIGWVRQMPGKGLEWMGIIYPGDSDTRYSPSFQGQVTISADKSISTAYLQWSSLKASDTAMYYCARQPGWGGPFDPWGQGTLVTVSS

SEQ ID NO: 456 - protein, 259 aa, Artificial Sequence
  scFv
DIVMTQSPSTLSASVGDRVTITCRASQSISSWLAWYQQKPGKAPKLLIYKASSLESGVPSRFSGSGSGTEFTLTISSLQPDDFATYYCQQYNSYPYTFGQGTKVEIKRGGGGSGGGGSGGGGSGGGGSGGGGSGGGGSAEVQLQQSGPGLVKPSQTLSVTCTFSGGSISSSGYYWNWIRQHPGKGLEWIGYIYHSGSTYYNPSLKRRLTMSVDTSKNQFSLRLSSVTAADTAVYYCARSLRLYGFFDYWGQGTLVTVSS

SEQ ID NO: 457 - protein, 249 aa, Artificial Sequence
  scFv
DVVMTQSPSSLSASVGDRVTITCRASQSISSYLNWYQQKPGKAPKLLIYAASSLQSGVPSRFSGSGSGTDFTLTISSLQPEDFATYYCQQSYSTRMYTFGQGTKVEIKRGGGGSGGGGSGGGGSGGGGSAEVQLVESGGGLVQPGRSLRLSCAASGFTFDDYAMHWVRQAPGKGLEWVSGISWNSGSIGYADSVKGRFTISRDNAKNSLYLQMNSLRAEDTALYYCAKDFTGDNAFDIWGQGTMVTVSS

SEQ ID NO: 458 - protein, 250 aa, Artificial Sequence
  scFv
DIVMTQSPSSLSASVGDRVTITCRASQSISSYLNWYQQKPGKAPKLLIYAASSLQSGVPSRFSGSGSGTDFTLTISSLQPEDFATYFCQQAYSFPPYTFGQGTKLEIKRGGGGSGGGGSGGGGSGGGGSAEVQLQQSGAEVKKPGESLKISCKGSGYSFTSYWIGWVRQMPGKGLEWMGIIYPGDSDTRYSPSFQGQVTISADKSISTAYLQWSSLKASDTAMYYCARLAMVQGAPADYWGQGTLVTVSS

SEQ ID NO: 459 - protein, 245 aa, Artificial Sequence
  scFv
AEVQLQQSGGGLVKPGGSLRLSCAASGFTFSDSYMTWIRQTPGQSLEWVSYISNSGDAIYYAGSVRGRFIVSRDNSKNLLFLQMNNLRADDSATYYCTTGKRSYRVWGQGTLVTVSSGGGGSGGGGSGGGGSGGGGSEIVLTQSPSSLSASVGDRVTITCRASQSISSYLNWYQQKPGKAPKLLIYAASSLQSGVPSRFSGSGSGTDFTLTISSLQPEDFATYYCQQSYSTPQTFGQGTRLEIKR

SEQ ID NO: 460 - protein, 252 aa, Artificial Sequence
  scFv
DIQMTQSPSTLSASVGDRVTITCRASQSISTWLAWYQQKPGKAPNLLIYKASTLKSGVPSRFSGSGSGTEFTLTISSLQPDDFATYYCQQYDSSPYTFGQGTKLEIKRGGGGSGGGGSGGGGSGGGGSAEVQLVESGGGLVQPGRSLRLSCAASGFTFDDYAMHWVRQAPGKGLEWVSGISWNSGSIGYADSVKGRFTISRDNAKNSLYLQMNSLRAEDTALYYCAKDISPDWSRGGWFDPWGQGTLVTVSS

SEQ ID NO: 461 - protein, 252 aa, Artificial Sequence
  scFv
DIVMTQSPSSVSASVGDRVTITCRASQGISSWLAWYQQKPGKAPKLLIYAASSLQSGVPSRFSGSGSGTDFTLTISSLQPEDFATYYCQQANSFPYTFGQGTKLEIKRGGGGSGGGGSGGGGSGGGGSAEVQLQQSGGGLVQPGRSLRLSCAASGFTFDDYAMHWVRQAPGKGLEWVSGISWNSGSIGYADSVKGRFTISRDNAKNSLYLQMNSLRAEDTALYYCAKDISPDWSRGGWFDPWGQGTLVTVSS

SEQ ID NO: 462 - protein, 240 aa, Artificial Sequence
  scFv
AEVQLLQSGAEVKKPGESLKISCRDSGHTFGDYWIGWVRQMPGKGLEWMGIIYPDDSDTRYSPSFQGQVTISADKSISTAYLQWNSLKASDSAIYYCAARGSGWYSDAFDAWGQGTTVTVSSGGGGSGGGGSDIQMTQSPSSLSASVGDRVTITCRASQSISTYLNWYQQKPGKAPKLLIYAASSLQSGVPSRFSGSGSGTDFTLTISSLQPEDFATYSCQQSYSYPITFGQGTRLEIKR

SEQ ID NO: 463 - protein, 245 aa, Artificial Sequence
  scFv
EIVLTQSPSSLSASVGDRVTITCRASQSISSYLNWYQQKPGKAPKLLIYAASSLQSGVPSRFSGSGSGTDFTLTISSLQPEDFATYYCQQSYSRPPTFGQGTKLEIKRGGGGSGGGGSGGGGSAEVQLVESGGGLVQPGGSLRLSCSASGFTFNDYAMHWVRQAPGKGLEFVSAINSNGGSTYYADSVKGRFTISRDNSKNTLYIQMSSLRPEDTAVYYCVKVGGSSSWYGFDYWGQGTLVTVSS

SEQ ID NO: 464 - protein, 248 aa, Artificial Sequence
  scFv
DVVMTQSPGTLSLSPGERATLSCRASQSVSSSYLAWYQQKPGQAPRLLIYGASSRATGIPDRFSGSGSGTDFTLTISRLEPEDFAVYYCQQYGSSPRTFGQGTKVEIKRGGGGSGGGGSGGGGSAEVQLVQSGGGLVKPGGSLRLSCAASGFTFSNAWMSWVRQAPGKGLEWVGRIKSKTDGGTTDYAAPVKGRFTISRDDSKNTLYLQMNSLKTEDTAVYYCTTEPGIAVAGLGGYWGQGTLVTVSS

SEQ ID NO: 465 - protein, 252 aa, Artificial Sequence
  scFv
AEVQLVESGGGLVKPGGSLRLSCAASGFTFSNAWMSWVRQAPGKGLEWVGRIKSKTDGGTTDYAAPVKGRFTISRDDSKNTLYLQMNSLKTEDTAVYYCTTVTGVLPKGGYWGQGTLVTVSSGGGGSGGGGSGGGGSGGGGSETTLTQSPGTLSLSPGEGATLSCRASQSVSSGNLAWYQQKPGQPPRLLIFGASSRATGIPDRFSGSGSGLDFTLTISRLEPEDFAVYYCQQYGSSPMYSFGQGTKVEIKR

SEQ ID NO: 466 - protein, 251 aa, Artificial Sequence
  scFv
DIVMTQSPSSLSASVGDRVTITCRASQNISSYLNWYQQKPGKAPKLLIYAASTLQSGVPSRFSGSGSGTDFTLTIISLQPEDFATYYCQQSYSTPRTLTFGGGTKLEIKRGGGGSGGGGSGGGGSGGGGSAEVQLLQSGGGLVQPGGSMRLSCAASGFPFSGYYGLNWVRRAPGKGLEWVAYIAGRDSSIYYADSVRGRFTVSRDSDRDSVFLQMNRLRVDDTAVYYCATDGSGHLGFDYWGQGTLVTVSS

SEQ ID NO: 467 - protein, 241 aa, Artificial Sequence
  scFv
DVVMTQSPSSVSASVGDRVTITCRASQGISSWLAWYQQRPGKAPKFLIYAASSLQSGVPSRFSGSGSGTDFTLTISSLQPEDFATYYCQQANSFPITFGQGTRLEIKRGGGGSGGGGSAQVNLRESGGGLVQPGGSLRLSCAASRFTFSSYEMNWVRQAPGKGLEWVSYISSSGTTMYYADSVKGRFTISRDNAKNSLYLQMNSLRAEDTAVYYCARDGMRLVDRGAFDIWGQGTMVTVSS

SEQ ID NO: 468 - protein, 262 aa, Artificial Sequence
  scFv
EIVLTQSPSSLSASVGDRVTITCRASQSISTNLNWYQQKPGKAPKLLIYAASSFQSGVPSRFSGSGSGTDFTLTISSLQPEDFATYYCQQSYNTPPYTFGQGTKVEIKRGGGGSGGGGSGGGGSGGGGSGGGGSGGGGSAQVQLVQSGGGLVQPGGSLRLSCAASRFTFSSYEMNWVRQAPGKGLEWVSYISSSGTTMYYADSVKGRFTISRDNAKNSLYLQMNSLRAEDTAVYYCARDGMRLVDRGAFDIWGQGTMVTVSS

SEQ ID NO: 469 - protein, 247 aa, Artificial Sequence
  scFv
DIVMTQSPGTLSLSPGERATLSCRASQSVSSSYLAWYQQKPGQAPRLLIYGASSRATGIPDRFSGSGSGTDFTLTISRLEPEDFAVYYCQQYGSSPYTFGQGTKLEIKRGGGGSGGGGSAQVQLVQSGAEVKKPGSSVKVSCKASGGTFSRYEINWVRQAPGQGLEWMGRIIPNLGIANYAQELQGRVTIIADKSTSTAYMELSSLRSDDTAVYYCARGSKWLAPPPSYYYYGMDVWGQGTTVTVSS

SEQ ID NO: 470 - protein, 256 aa, Artificial Sequence
  scFv
ETTLTQSPSILSASVGDRVTFTCRASQTISNWLAWYQQKPGKAPKLLIYKASILETGVPSRFSGSGSGTEFTLTISSVQPDDFATYYCQQYSDYVTFGQGTKVDIKRGGGGSGGGGSGGGGSGGGGSGGGGSGGGGSAQVQLQESGGGLVQPGRSLRLSCAASGFTFDDHAMHWVRQAPGKGLEWVSGIYRRGGAVGYADSVKGRFTISRDDAKNSLYLEMNSLRPEDTALYYCGSDRSPGGMDVWGQGTMVTVSS

SEQ ID NO: 471 - protein, 267 aa, Artificial Sequence
  scFv
DIVMTQSPGTLSLSPGERATLSCRASQSVSSSYLAWYQQKPGQAPRLLIYGASSRATGIPDRFSGSGSGTDFTLTISRLEPEDFAVYYCQQYGSSPPLYTFGQGTKLEIKRGGGGSGGGGSGGGGSGGGGSGGGGSGGGGSAQVQLVQSGAEVKKPGASVTVSCKASGYPFLSHYVHWVRQAPGQGLEWMGIIDARGGGTSYPLEFQGRVTMTRDTSTNTVFLKLTNLRSTDTAVYYCARDPVGYGGNPGGPYLDLWGQGTLVTVSS

SEQ ID NO: 472 - protein, 246 aa, Artificial Sequence
  scFv
EIVLTQSPATLSVSPGEGAALSCRASQSVSSNVAWYQQKPGQAPRLLIYGASTRATGVPARFRGGGAGTDFTLTISSLQSEDVGTYYCQQYTRGRESYFGQGTKVDIKRGGGGSGGGGSGGGGSAQVQLQESGGGVVQPGGSLRLSCAASGFTFSKYGMHWVRQAPGKGLEWVAVVSYNGGNDFYADSVKGRFTISRDNSKNTLDLQMDSLKAEDTALYFCAKDQGGYYFYGMDVWGQGTTVTVSS

SEQ ID NO: 473 - protein, 240 aa, Artificial Sequence
  scFv
DIVMTQSPGILSLSPGERATLSCRASQSVNRRYLAWYQQKPGQAPSLLIYGASNRATGVPDRFSGSGSGTDFTLTISRLEPEDFAVYYCQQYGGSPGYTFGQGTKLEIKRGGSSRSSAQVQLQESGGGLVQPGRSLRLSCAASGFTFDDYAMHWVRQAPGKGLEWVSGISWNSGSIGYADSVKGRFTISRDNAKNSLYLQMNSLRAEDTALYYCAKGQSSFLPRGGMDVWGQGTTVTVSS

SEQ ID NO: 474 - protein, 256 aa, Artificial Sequence
  scFv
EIVLTQSPSSLSASVGDRVTISCRAGQGIGSYLNWYQQRPGKAPNLLISGGTDLQSGVPSRFSGSESGTDFTLTISSLQPEDFATYFCQQSYSSPPTFGQGTKLEIKRGGGGSGGGGSGGGGSGGGGSGGGGSAEVQLQQSGGGLVKPGGSLRLSCAASGFTFSNAWMSWVRQAPGKGLEWVGRIKSKTDGGTTDYAAPVKGRFTISRDDSKNTLYLQMNSLKTEDTAVYYCTTGPDVLRLAGGYWGQGTLVTVSS

SEQ ID NO: 475 - protein, 254 aa, Artificial Sequence
  scFv
EIVLTQSPSSVSASVGDRVTITCRASQGISSWLAWYQQKPGKAPKLLIYATSSLESGVPSRFSGSGSGTDFTLTISNLQPEDFATYYCQQANSFPLTFGGGTKVEIKRGGGGSGGGGSGGGGSGGGGSAEVQLLQSGGGLVEPGRSLRLSCAGSGFTFGDYAMHWVRQAPGKGLEWVSGISWNSDSIGQADSVKGRFTISRDNAKNSLYLQMNSLRAEDAALYYCAKDTTGYYYGLGRRAMDVWGQGTMVTVSS

SEQ ID NO: 476 - protein, 243 aa, Artificial Sequence
  scFv
DIVMTQSPSTLSASVGDRVLITCRASQSIGSWLAWYQQKPGRAPKLLIYEASGLQSGVPSRFSGSGSGTQFTLAISSLQADDFATYYCQHREIFGGGTKLEIKRGGGGSGGGGSGGGGSAEVQLVQSGGGLVQPGRSLRLSCAASGFTFDDYAMHWVRQAPGKGLEWVSGISWNSGSIGYADSVKGRFTISRDNAKNSLYLQMNSLRAEDTALYYCAKDMSEWLVRGDAFDIWGQGTMVTVSS

SEQ ID NO: 477 - protein, 266 aa, Artificial Sequence
  scFv
DIVMTQSPSSLSASVGDRVTITCRASQSISSYLNWYQQKPGKAPKLLIYAASSLQSGVPSRFSGSGSGTDFTLTISSLQPEDFATYYCQQSYSRPPTFGQGTKLEIKRGGGGSGGGGSGGGGSGGGGSGGGGSGGGGSAQVQLQESGGGVVQPGRSLRLSCAASGFTFSSYAMHWVRQAPGKGLEWVAVISYDGSNKYYADSVKGRFTISRDNSKNTLYLQMNSLRAEDTAVYYCASLGGYCTGGVCDAPLPLDYWGQGTLVTVSS

SEQ ID NO: 478 - protein, 247 aa, Artificial Sequence
  scFv
AEVQLVESGGGLVQPGGSLRLSCSASGFTFSNYAMHWVRQAPGKGLEYVSAITSNGGSTYYADSVRGRFTISRDNSKNTLYLQLSSLRAEDTGLYYCVKDEGGPTVTTGPFDYWGQGTLVTVSSGGGGSGGGGSGGGGSETTLTQSPSSLSASVGDRVTITCQASQDIRHYLSWFQQKPGKAPKALIYEASNLETGVPSRFSGSGSGTDFTFTISNLQPQDVATYYCQQADKLPLTFGGGTKLEIKR

SEQ ID NO: 479 - protein, 258 aa, Artificial Sequence; identical to SEQ ID NO: 437
  scFv

SEQ ID NO: 480 - protein, 250 aa, Artificial Sequence; identical to SEQ ID NO: 438
  scFv

SEQ ID NO: 481 - protein, 250 aa, Artificial Sequence
  scFv
EIVLTQSPSSLSASVGDRVTITCRASQSISRYVNWYQQKPGKALTLLIYAASSLQSGVPSRFSGSGSGTDFTLTISSLQPEDFATYYCQQRYSIPYDFGPGTRLEIKRGGGGSGGGGSGGGGSGGGGSAEVQLLQSGAEVKKPGESLKISCKVSGYSFSSYWIGWVRQMPGKGLEWMGIIYPGDSNTRYSPSLHGQVSFSADKSISTAYLQWSSLKASDTAMYYCARLIYGDYGGGLDYWGQGTLVTVSS

SEQ ID NO: 482 - protein, 248 aa, Artificial Sequence; identical to SEQ ID NO: 439
  scFv

SEQ ID NO: 483 - protein, 248 aa, Artificial Sequence
  scFv
DIQMTQSPSSLSASVGDRVTITCRASQSISSYLNWYQQKPGKAPKLLIYAASSLQSGVPSRFSGSGSGTDFTLTISSLQPEDFATYYCQQSYSTRPYTFGQGTKVEIKRGGGGSGGGGSGGGGSGGGGSAEVQLQQSGAEVKKPGSSVKVSCKASGGTFSSYAISWVRQAPGQGLEWMGGIIPIFGTANYAQKFQGRVTITADESTSTAYMELSSLRSEDTAVYYCARVYSSGWFDYWGQGTLVTVSS

SEQ ID NO: 484 - protein, 262 aa, Artificial Sequence
  scFv
DIVMTQSPSSLSASVGDRVTITCRASQSISSYLNWYQQKPGKAPKLLIYAASSLQSGVPSRFSGSGSGTDFTLTISSLQPEDFATYYCQQSYSTPLTFGGGTKLEIKRGGGGSGGGGSGGGGSGGGGSGGGGSGGGGSAQVQLVQSGPGLVKPSQTLSLTCAISGDSVSSNSAAWNWIRQSPSRGLEWLGRTYYRSKWYNDYAVSVKSRITINPDTSKNQFSLQLNSVTPEDTAVYYCARLGYSSSWPFDYWGQGTLVTVSS

SEQ ID NO: 485 - protein, 245 aa, Artificial Sequence
  scFv
ETTLTQSPSSLSASVGDRVTITCRASQSISSYLNWYQQKPGKAPKLLIYAASSLQSGVPSRFSGSGSGTDFTLTISSLQPEDFATYYCQQSYSTPYTFGQGTKLEIKRGGGGSGGGGSGGGGSGGGGSAQVQLQESGPGLVKPSETLSLTCTVSGYSITSRSYWGWVRQSPGKGLEWLGSLSWTGSTQYNPSLRGRVTISLDRSNSQFSLRLTSVSAADTATYYCVRDNRALDSWGQGTLVTVSS

SEQ ID NO: 486 - protein, 258 aa, Artificial Sequence; identical to SEQ ID NO: 444
  scFv

SEQ ID NO: 487 - protein, 255 aa, Artificial Sequence; identical to SEQ ID NO: 445
  scFv

SEQ ID NO: 488 - protein, 241 aa, Artificial Sequence; identical to SEQ ID NO: 446
  scFv

SEQ ID NO: 489 - protein, 249 aa, Artificial Sequence
  scFv
DVVMTQSPSSLSASVGDRVTITCRASQSISSYLNWYQQKPGKAPKLLIYAASSMQSGVPSRFSGSGSGTDFTLTISSLQPEDFATYYCQQSYSTRMYTFGQGTKVEIKRGGGGSGGGGSGGGGSGGGGSAEVQLVESGGGLVQPGRSLRLSCAASGFTFDDYAMHWVRQAPGKGLEWVSGISWNSGSIGYADSVKGRFTISRDNAKNSLYLQMNSLRAEDTALYYCAKDFTGDNAFDIWGQGTMVTVSS

SEQ ID NO: 490 - protein, 247 aa, Artificial Sequence
  scFv
DVVMTQSPSSLSASVGDRVTITCRASQSISSYLNWYQQKPGKAPKLLIYAASSLQSGVPSRFSGSGSGTDFTLTISSLQPEDFATYYCQQSYSRPPTFGQGTKVDIKRGGGGSGGGGSGGGGSAEVQLQQSGPGLVKPSQTLSLTCAISGDSVTDNSAAWNWIRQSPSRGLEWLGRTYYRFKWYNEYAESVKSRIGINPDISKNQFSLQLSSVTPEDTAVYYCVRGGTRSYSDFDYWGQGTLVTVSS

SEQ ID NO: 491 - protein, 249 aa, Artificial Sequence
  scFv
EIVLTQSPSSLSASVGDRVTITCRASQSISSYLNWYQQKPGKAPKLLIYAASSLQSGVPSRFSGSGSGTDFTLTISSLQPEDFATYYCQQSYSRPPTFGQGTKVDIKRGGGGSGGGGSGGGGSGGGGSAQVQLVQSGAEVKKPGASVKVSCKASGYTFTSYYMHWVRQAPGQGLEWMGIINPSGGSTSYAQKFQGRVTMTRDTSTSTVYMELSSLRSEDTAVYYCARAAPEFRGAFDIWGQGTMVTVSS

SEQ ID NO: 492 - protein, 252 aa, Artificial Sequence; identical to SEQ ID NO: 460
  scFv

SEQ ID NO: 493 - protein, 252 aa, Artificial Sequence
  scFv
DIQMTQSPSTLSASVGDRVTITCRASQSISTWLAWYQQKPVKAPNLLIYKASTLKSGVPSRFSGSGSGTEFTLTISSLQPDDFATYYCQQYDSSPYTFGQGTKLEIKRGGGGSGGGGSGGGGSGGGGSAEVQLVESGGGLVQPGRSLRLSCAASGFTFDDYAMHWVRQAPGKGLEWVSGISWNSGSIGYADSVKGRFTISRDNAKNSLYLQMNSLRAEDTALYYCAKDISPDWSRGGWFDPWGQGTLVTVSS

SEQ ID NO: 494 - protein, 252 aa, Artificial Sequence
  scFv
DIQMTQSPSTLSASVGDRVTITCRASQSISTWLAWYQQQPGKAPNLLIYKASTLKSGVPSRFSGSGSGTEFTLTISSLQPDDFATYYCQQYDSSPYTFGQGTKLEIKRGGGGSGGGGSGGGGSGGGGSAEVQLVESGGGLVQPGRSLRLSCAASGFTFDDYAMHWVRQAPGKGLEWVSGISWNSGSIGYADSVKGRFTISRDNAKNSLYLQMNSLRAEDTALYYCAKDISPDWSRGGWFDPWGQGTLVTVSS

SEQ ID NO: 495 - protein, 251 aa, Artificial Sequence; identical to SEQ ID NO: 466
  scFv

SEQ ID NO: 496 - protein, 251 aa, Artificial Sequence
  scFv
DIVMTQSPSSLCASVGDRVTITCRSSQNISRYLTWYQQKPGIARKLLMYVASTLQSGVPSRFSGSGSGTDFTLTIISLQPEDFATYYCQQSYSTPRTLTFGGGTKLEIKRGGGGSGGGGSGGGGSGGGGSAEVQLLQSGGGLVQPGGSMRLSCAASGFPFSGYYGLNWVRRAPGKGLEWVAYIAGRDSSIYYADSVRGRFTVSRDSDRDSVFLQMNRLRVDDTAVYYCATDGSGHLGFDYWGQGTLVTVSS

SEQ ID NO: 497 - protein, 256 aa, Artificial Sequence
  scFv
ERTLTQSPFILSASVGDRVTFTCRASQTISNWLAWYQQKPGKAPKLLIYKASILETGVPSRFSGSGSGTEFTLTISSVQPDDFATYYCQQYSDYVTFGQGTKVDIKRGGGGSGGGGSGGGGSGGGGSGGGGSGGGGSAQVQLQESGGGLVQPGRSLRLSCAASGFTFDDHAMHWVRQAPGKGLEWVSGIYRRGGAVGYADSVKGRFTISRDDAKNSLYLEMNSMRPEDTALYYCGSDRSPGGMDVWGQGTMVTVSS

SEQ ID NO: 498 - protein, 8 aa, Artificial Sequence
  HCDR1
GFTFSSYS

SEQ ID NO: 499 - protein, 8 aa, Artificial Sequence
  HCDR1
GYSFSSYW

SEQ ID NO: 500 - protein, 8 aa, Artificial Sequence
  HCDR1
GGTFSSYA

SEQ ID NO: 501 - protein, 8 aa, Artificial Sequence
  HCDR1
GYSFTSYW

SEQ ID NO: 502 - protein, 8 aa, Artificial Sequence
  HCDR1
GDSIRGHY

SEQ ID NO: 503 - protein, 8 aa, Artificial Sequence
  HCDR1
GYTFTSYY

SEQ ID NO: 504 - protein, 9 aa, Artificial Sequence
  HCDR1
GYSITSRSY

SEQ ID NO: 505 - protein, 8 aa, Artificial Sequence
  HCDR1
GFTFSSYW

SEQ ID NO: 506 - protein, 8 aa, Artificial Sequence
  HCDR1
GFTFAHDA

SEQ ID NO: 507 - protein, 8 aa, Artificial Sequence
  HCDR1
GFTFSSYP

SEQ ID NO: 508 - protein, 10 aa, Artificial Sequence
  HCDR1
GGSISSGGYY

SEQ ID NO: 509 - protein, 8 aa, Artificial Sequence
  HCDR1
GYTFTGNY

SEQ ID NO: 510 - protein, 8 aa, Artificial Sequence
  HCDR1
GFTVSSNY

SEQ ID NO: 511 - protein, 8 aa, Artificial Sequence
  HCDR1
GFTFSSYA

SEQ ID NO: 512 - protein, 10 aa, Artificial Sequence
  HCDR1
GGSISSSGYY

SEQ ID NO: 513 - protein, 8 aa, Artificial Sequence
  HCDR1
GFTFDDYA

SEQ ID NO: 514 - protein, 8 aa, Artificial Sequence
  HCDR1
GFTFSDSY

SEQ ID NO: 515 - protein, 8 aa, Artificial Sequence
  HCDR1
GHTFGDYW

SEQ ID NO: 516 - protein, 8 aa, Artificial Sequence
  HCDR1
GFTFNDYA

SEQ ID NO: 517 - protein, 8 aa, Artificial Sequence
  HCDR1
GFTFSNAW

SEQ ID NO: 518 - protein, 8 aa, Artificial Sequence
  HCDR1
FPFSGYYG

SEQ ID NO: 519 - protein, 8 aa, Artificial Sequence
  HCDR1
RFTFSSYE

SEQ ID NO: 520 - protein, 8 aa, Artificial Sequence
  HCDR1
GGTFSRYE

SEQ ID NO: 521 - protein, 8 aa, Artificial Sequence
  HCDR1
GFTFDDHA

SEQ ID NO: 522 - protein, 8 aa, Artificial Sequence
  HCDR1
GYPFLSHY

SEQ ID NO: 523 - protein, 8 aa, Artificial Sequence
  HCDR1
GFTFSKYG

SEQ ID NO: 524 - protein, 8 aa, Artificial Sequence
  HCDR1
GFTFGDYA

SEQ ID NO: 525 - protein, 8 aa, Artificial Sequence
  HCDR1
GFTFSNYA

SEQ ID NO: 526 - protein, 9 aa, Artificial Sequence
  HCDR1
VSSNSAAWN

SEQ ID NO: 527 - protein, 9 aa, Artificial Sequence
  HCDR1
VTDNSAAWN

SEQ ID NO: 528 - protein, 8 aa, Artificial Sequence
  HCDR2
ISSRSNDI

SEQ ID NO: 529 - protein, 8 aa, Artificial Sequence
  HCDR2
IYPGDSNT

SEQ ID NO: 530 - protein, 8 aa, Artificial Sequence
  HCDR2
IIPIFGTA

SEQ ID NO: 531 - protein, 8 aa, Artificial Sequence
  HCDR2
IYPGESDI

SEQ ID NO: 532 - protein, 7 aa, Artificial Sequence
  HCDR2
TSDTGDT

SEQ ID NO: 533 - protein, 8 aa, Artificial Sequence
  HCDR2
INPSGGST

SEQ ID NO: 534 - protein, 7 aa, Artificial Sequence
  HCDR2
LSWTGST

SEQ ID NO: 535 - protein, 8 aa, Artificial Sequence
  HCDR2
IKQDGSEK

SEQ ID NO: 536 - protein, 8 aa, Artificial Sequence
  HCDR2
ITYGGGGT

SEQ ID NO: 537 - protein, 8 aa, Artificial Sequence
  HCDR2
ISHDESNK

SEQ ID NO: 538 - protein, 7 aa, Artificial Sequence
  HCDR2
IYYSGST

SEQ ID NO: 539 - protein, 8 aa, Artificial Sequence
  HCDR2
INPNTDGT

SEQ ID NO: 540 - protein, 7 aa, Artificial Sequence
  HCDR2
IYSGGST

SEQ ID NO: 541 - protein, 8 aa, Artificial Sequence
  HCDR2
ISGSGGST

SEQ ID NO: 542 - protein, 8 aa, Artificial Sequence
  HCDR2
ISYDGSNK

SEQ ID NO: 543 - protein, 8 aa, Artificial Sequence
  HCDR2
IYPGDSDT

SEQ ID NO: 544 - protein, 7 aa, Artificial Sequence
  HCDR2
IYHSGST

SEQ ID NO: 545 - protein, 8 aa, Artificial Sequence
  HCDR2
ISWNSGSI

SEQ ID NO: 546 - protein, 8 aa, Artificial Sequence
  HCDR2
ISNSGDAI

SEQ ID NO: 547 - protein, 8 aa, Artificial Sequence
  HCDR2
IYPDDSDT

SEQ ID NO: 548 - protein, 8 aa, Artificial Sequence
  HCDR2
INSNGGST

SEQ ID NO: 549 - protein, 10 aa, Artificial Sequence
  HCDR2
IKSKTDGGTT

SEQ ID NO: 550 - protein, 8 aa, Artificial Sequence
  HCDR2
IAGRDSSI

SEQ ID NO: 551 - protein, 8 aa, Artificial Sequence
  HCDR2
ISSSGTTM

SEQ ID NO: 552 - protein, 8 aa, Artificial Sequence
  HCDR2
IIPNLGIA

SEQ ID NO: 553 - protein, 8 aa, Artificial Sequence
  HCDR2
IYRRGGAV

SEQ ID NO: 554 - protein, 8 aa, Artificial Sequence
  HCDR2
IDARGGGT

SEQ ID NO: 555 - protein, 8 aa, Artificial Sequence
  HCDR2
VSYNGGND

SEQ ID NO: 556 - protein, 8 aa, Artificial Sequence
  HCDR2
ISWNSDSI

SEQ ID NO: 557 - protein, 8 aa, Artificial Sequence
  HCDR2
ITSNGGST

SEQ ID NO: 558 - protein, 7 aa, Artificial Sequence
  HCDR2
YRSKWYN

SEQ ID NO: 559 - protein, 7 aa, Artificial Sequence
  HCDR2
YRFKWYN

SEQ ID NO: 560 - protein, 22 aa, Artificial Sequence
  HCDR3
ARPYYFDSSGYVNYYSYYGLDV

SEQ ID NO: 561 - protein, 14 aa, Artificial Sequence
  HCDR3
ARLIYGDYGGGLDY

SEQ ID NO: 562 - protein, 11 aa, Artificial Sequence
  HCDR3
ARVYSSGWFDY

SEQ ID NO: 563 - protein, 10 aa, Artificial Sequence
  HCDR3
ARQRYWYFDL

SEQ ID NO: 564 - protein, 15 aa, Artificial Sequence
  HCDR3
ARVDPEDPSGALLDL

SEQ ID NO: 565 - protein, 11 aa, Artificial Sequence
  HCDR3
ARSKGKGPFDY

SEQ ID NO: 566 - protein, 9 aa, Artificial Sequence
  HCDR3
VRDNRALDS

SEQ ID NO: 567 - protein, 19 aa, Artificial Sequence
  HCDR3
ARAVGDSSGWYQDYYGMDV

SEQ ID NO: 568 - protein, 10 aa, Artificial Sequence
  HCDR3
ARGGVGAFDS

SEQ ID NO: 569 - protein, 15 aa, Artificial Sequence
  HCDR3
ARERGGGYSYGIGDY

SEQ ID NO: 570 - protein, 11 aa, Artificial Sequence
  HCDR3
ARDRSERAFDI

SEQ ID NO: 571 - protein, 11 aa, Artificial Sequence
  HCDR3
ARDTTGNAFHI

SEQ ID NO: 572 - protein, 11 aa, Artificial Sequence
  HCDR3
ARDQPGARFDP

SEQ ID NO: 573 - protein, 11 aa, Artificial Sequence
  HCDR3
AKDPEMATIHY

SEQ ID NO: 574 - protein, 14 aa, Artificial Sequence
  HCDR3
ARSDGYSYPRHFDY

SEQ ID NO: 575 - protein, 12 aa, Artificial Sequence
  HCDR3
ARQPGWGGPFDP

SEQ ID NO: 576 - protein, 12 aa, Artificial Sequence
  HCDR3
ARSLRLYGFFDY

SEQ ID NO: 577 - protein, 12 aa, Artificial Sequence
  HCDR3
AKDFTGDNAFDI

SEQ ID NO: 578 - protein, 13 aa, Artificial Sequence
  HCDR3
ARLAMVQGAPADY

SEQ ID NO: 579 - protein, 9 aa, Artificial Sequence
  HCDR3
TTGKRSYRV

SEQ ID NO: 580 - protein, 16 aa, Artificial Sequence
  HCDR3
AKDISPDWSRGGWFDP

SEQ ID NO: 581 - protein, 14 aa, Artificial Sequence
  HCDR3
AARGSGWYSDAFDA

SEQ ID NO: 582 - protein, 14 aa, Artificial Sequence
  HCDR3
VKVGGSSSWYGFDY

SEQ ID NO: 583 - protein, 14 aa, Artificial Sequence
  HCDR3
TTEPGIAVAGLGGY

SEQ ID NO: 584 - protein, 12 aa, Artificial Sequence
  HCDR3
TTVTGVLPKGGY

SEQ ID NO: 585 - protein, 12 aa, Artificial Sequence
  HCDR3
ATDGSGHLGFDY

SEQ ID NO: 586 - protein, 15 aa, Artificial Sequence
  HCDR3
ARDGMRLVDRGAFDI

SEQ ID NO: 587 - protein, 20 aa, Artificial Sequence
  HCDR3
ARGSKWLAPPPSYYYYGMDV

SEQ ID NO: 588 - protein, 11 aa, Artificial Sequence
  HCDR3
GSDRSPGGMDV

SEQ ID NO: 589 - protein, 18 aa, Artificial Sequence
  HCDR3
ARDPVGYGGNPGGPYLDL

SEQ ID NO: 590 - protein, 14 aa, Artificial Sequence
  HCDR3
AKDQGGYYFYGMDV

SEQ ID NO: 591 - protein, 15 aa, Artificial Sequence
  HCDR3
AKGQSSFLPRGGMDV

SEQ ID NO: 592 - protein, 13 aa, Artificial Sequence
  HCDR3
TTGPDVLRLAGGY

SEQ ID NO: 593 - protein, 18 aa, Artificial Sequence
  HCDR3
AKDTTGYYYGLGRRAMDV

SEQ ID NO: 594 - protein, 16 aa, Artificial Sequence
  HCDR3
AKDMSEWLVRGDAFDI

SEQ ID NO: 595 - protein, 20 aa, Artificial Sequence
  HCDR3
ASLGGYCTGGVCDAPLPLDY

SEQ ID NO: 596 - protein, 16 aa, Artificial Sequence
  HCDR3
VKDEGGPTVTTGPFDY

SEQ ID NO: 597 - protein, 13 aa, Artificial Sequence
  HCDR3
ARLGYSSSWPFDY

SEQ ID NO: 598 - protein, 13 aa, Artificial Sequence
  HCDR3
VRGGTRSYSDFDY

SEQ ID NO: 599 - protein, 13 aa, Artificial Sequence
  HCDR3
ARAAPEFRGAFDI

SEQ ID NO: 600 - protein, 6 aa, Artificial Sequence
  LCDR1
QSISSY

SEQ ID NO: 601 - protein, 6 aa, Artificial Sequence
  LCDR1
QSISRY

SEQ ID NO: 602 - protein, 6 aa, Artificial Sequence
  LCDR1
QGISSF

SEQ ID NO: 603 - protein, 11 aa, Artificial Sequence
  LCDR1
QSLLHSNGYNY

SEQ ID NO: 604 - protein, 7 aa, Artificial Sequence
  LCDR1
QSVSSSY

SEQ ID NO: 605 - protein, 6 aa, Artificial Sequence
  LCDR1
QGISSA

SEQ ID NO: 606 - protein, 6 aa, Artificial Sequence
  LCDR1
QGISSW

SEQ ID NO: 607 - protein, 6 aa, Artificial Sequence
  LCDR1
QSISSW

SEQ ID NO: 608 - protein, 6 aa, Artificial Sequence
  LCDR1
QTIRNY

SEQ ID NO: 609 - protein, 6 aa, Artificial Sequence
  LCDR1
QSISGY

SEQ ID NO: 610 - protein, 7 aa, Artificial Sequence
  LCDR1
QSVSGSY

SEQ ID NO: 611 - protein, 6 aa, Artificial Sequence
  LCDR1
PRIGND

SEQ ID NO: 612 - protein, 6 aa, Artificial Sequence
  LCDR1
PGIGND

SEQ ID NO: 613 - protein, 6 aa, Artificial Sequence
  LCDR1
QSISTW

SEQ ID NO: 614 - protein, 6 aa, Artificial Sequence
  LCDR1
QSISTY

SEQ ID NO: 615 - protein, 7 aa, Artificial Sequence
  LCDR1
QSVSSGN

SEQ ID NO: 616 - protein, 6 aa, Artificial Sequence
  LCDR1
QNISSY

SEQ ID NO: 617 - protein, 6 aa, Artificial Sequence
  LCDR1
QSISTN

SEQ ID NO: 618 - protein, 6 aa, Artificial Sequence
  LCDR1
QTISNW

SEQ ID NO: 619 - protein, 6 aa, Artificial Sequence
  LCDR1
QSVSSN

SEQ ID NO: 620 - protein, 7 aa, Artificial Sequence
  LCDR1
QSVNRRY

SEQ ID NO: 621 - protein, 6 aa, Artificial Sequence
  LCDR1
QGIGSY

SEQ ID NO: 622 - protein, 6 aa, Artificial Sequence
  LCDR1
QSIGSW

SEQ ID NO: 623 - protein, 6 aa, Artificial Sequence
  LCDR1
QDIRHY

SEQ ID NO: 624 - protein, 6 aa, Artificial Sequence
  LCDR1
QNISRY

SEQ ID NO: 625 - protein, 3 aa, Artificial Sequence
  LCDR2
AAS

SEQ ID NO: 626 - protein, 3 aa, Artificial Sequence
  LCDR2
LGS

SEQ ID NO: 627 - protein, 3 aa, Artificial Sequence
  LCDR2
ATS

SEQ ID NO: 628 - protein, 3 aa, Artificial Sequence
  LCDR2
DAS

SEQ ID NO: 629 - protein, 3 aa, Artificial Sequence
  LCDR2
EAS

SEQ ID NO: 630 - protein, 3 aa, Artificial Sequence
  LCDR2
GAS

SEQ ID NO: 631 - protein, 3 aa, Artificial Sequence
  LCDR2
GGT

SEQ ID NO: 632 - protein, 3 aa, Artificial Sequence
  LCDR2
KAS

SEQ ID NO: 633 - protein, 3 aa, Artificial Sequence
  LCDR2
VAS

SEQ ID NO: 634 - protein, 9 aa, Artificial Sequence
  LCDR3
QQSYSRPPT

SEQ ID NO: 635 - protein, 9 aa, Artificial Sequence
  LCDR3
QQRYSIPYD

SEQ ID NO: 636 - protein, 10 aa, Artificial Sequence
  LCDR3
QQSYSTRPWT

SEQ ID NO: 637 - protein, 9 aa, Artificial Sequence
  LCDR3
QQHSSYPLT

SEQ ID NO: 638 - protein, 10 aa, Artificial Sequence
  LCDR3
MQALQTSTYS

SEQ ID NO: 639 - protein, 9 aa, Artificial Sequence
  LCDR3
MQALQTPYT

SEQ ID NO: 640 - protein, 11 aa, Artificial Sequence
  LCDR3
QQYGSSPGVYT

SEQ ID NO: 641 - protein, 9 aa, Artificial Sequence
  LCDR3
QQSYITPHT

SEQ ID NO: 642 - protein, 9 aa, Artificial Sequence
  LCDR3
QQANSFPLT

SEQ ID NO: 643 - protein, 9 aa, Artificial Sequence
  LCDR3
MQALQTPPT

SEQ ID NO: 644 - protein, 8 aa, Artificial Sequence
  LCDR3
QQYHTYWT

SEQ ID NO: 645 - protein, 9 aa, Artificial Sequence
  LCDR3
QQSYSTPIT

SEQ ID NO: 646 - protein, 13 aa, Artificial Sequence
  LCDR3
QQSYSSPQLPMYT

SEQ ID NO: 647 - protein, 9 aa, Artificial Sequence
  LCDR3
QHYGSSPLT

SEQ ID NO: 648 - protein, 10 aa, Artificial Sequence
  LCDR3
QQYGSSPMYT

SEQ ID NO: 649 - protein, 9 aa, Artificial Sequence
  LCDR3
LQHNNYPYT

SEQ ID NO: 650 - protein, 9 aa, Artificial Sequence
  LCDR3
QQANSFPYT

SEQ ID NO: 651 - protein, 9 aa, Artificial Sequence
  LCDR3
QQYNSYPYT

SEQ ID NO: 652 - protein, 10 aa, Artificial Sequence
  LCDR3
QQSYSTRMYT

SEQ ID NO: 653 - protein, 10 aa, Artificial Sequence
  LCDR3
QQAYSFPPYT

SEQ ID NO: 654 - protein, 9 aa, Artificial Sequence
  LCDR3
QQSYSTPQT

SEQ ID NO: 655 - protein, 9 aa, Artificial Sequence
  LCDR3
QQYDSSPYT

SEQ ID NO: 656 - protein, 9 aa, Artificial Sequence
  LCDR3
QQSYSYPIT

SEQ ID NO: 657 - protein, 9 aa, Artificial Sequence
  LCDR3
QQYGSSPRT

SEQ ID NO: 658 - protein, 10 aa, Artificial Sequence
  LCDR3
QQYGSSPMYS

SEQ ID NO: 659 - protein, 11 aa, Artificial Sequence
  LCDR3
QQSYSTPRTLT

SEQ ID NO: 660 - protein, 9 aa, Artificial Sequence
  LCDR3
QQANSFPIT

SEQ ID NO: 661 - protein, 10 aa, Artificial Sequence
  LCDR3
QQSYNTPPYT

SEQ ID NO: 662 - protein, 9 aa, Artificial Sequence
  LCDR3
QQYGSSPYT

SEQ ID NO: 663 - protein, 8 aa, Artificial Sequence
  LCDR3
QQYSDYVT

SEQ ID NO: 664 - protein, 11 aa, Artificial Sequence
  LCDR3
QQYGSSPPLYT

SEQ ID NO: 665 - protein, 10 aa, Artificial Sequence
  LCDR3
QQYTRGRESY

SEQ ID NO: 666 - protein, 10 aa, Artificial Sequence
  LCDR3
QQYGGSPGYT

SEQ ID NO: 667 - protein, 9 aa, Artificial Sequence
  LCDR3
QQSYSSPPT

SEQ ID NO: 668 - protein, 5 aa, Artificial Sequence
  LCDR3
QHREI

SEQ ID NO: 669 - protein, 9 aa, Artificial Sequence
  LCDR3
QQADKLPLT

SEQ ID NO: 670 - protein, 10 aa, Artificial Sequence
  LCDR3
QQSYSTRPYT

SEQ ID NO: 671 - protein, 9 aa, Artificial Sequence
  LCDR3
QQSYSTPLT

SEQ ID NO: 672 - protein, 9 aa, Artificial Sequence
  LCDR3
QQSYSTPYT

SEQ ID NO: 673 - protein, 7 aa, Artificial Sequence
  LINKER1
GGSSRSS

SEQ ID NO: 674 - protein, 10 aa, Artificial Sequence
  LINKER2
GGGGSGGGGS

SEQ ID NO: 675 - protein, 25 aa, Artificial Sequence
  LINKER5
GGGGSGGGGSGGGGSGGGGSGGGGS

SEQ ID NO: 676 - protein, 49 aa, Artificial Sequence
  TM1
AVGQDTQEVIVVPHSLPFKVVVISAILALVVLTIISLIILIMLWQKKPR

SEQ ID NO: 677 - protein, 63 aa, Artificial Sequence
  TM2
EKSNGTIIHVKGKHLCPSPLFPGPSKPFWVLVVVGGVLACYSLLVTVAFIIFWVRSKRSRLLH

SEQ ID NO: 678 - protein, 85 aa, Artificial Sequence
  TM3
LDFNMTTNHSFMCLIKYGHLRVNQTFNWNTTKQEHFPDNLLPSWAITLISVNGIFVICCLTYCFAPRCRERRRNERLRRESVRPV

SEQ ID NO: 679 - protein, 88 aa, Artificial Sequence
  TM4
EKSNGTIIHVKGKHLCPSPLFPGPSKPFWVLVVVGGVLACYSLLVTVAFIIFWVRSKRSRLLHTYCFAPRCRERRRNERLRRESVRPV

SEQ ID NO: 680 - protein, 452 aa, Homo sapiens
  misc_feature (1)..(452): Caspase_2 full length
MAAPSAGSWSTFQHKELMAADRGRRILGVCGMHPHHQETLKKNRVVLAKQLLLSELLEHLLEKDIITLEMRELIQAKVGSFSQNVELLNLLPKRGPQAFDAFCEALRETKQGHLEDMLLTTLSGLQHVLPPLSCDYDLSLPFPVCESCPLYKKLRLSTDTVEHSLDNKDGPVCLQVKPCTPEFYQTHFQLAYRLQSRPRGLALVLSNVHFTGEKELEFRSGGDVDHSTLVTLFKLLGYDVHVLCDQTAQEMQEKLQNFAQLPAHRVTDSCIVALLSHGVEGAIYGVDGKLLQLQEVFQLFDNANCPSLQNKPKMFFIQACRGDETDRGVDQQDGKNHAGSPGCEESDAGKEKLPKMRLPTRSDMICGYACLKGTAAMRNTKRGSWYIEALAQVFSERACDMHVADMLVKVNALIKDREGYAPGTEFHRCKEMSEYCSTLCRHLYLFPGHPPT

SEQ ID NO: 681 - protein, 496 aa, Homo sapiens [sequence omitted]

SEQ ID NO: 682 - protein, 416 aa, Homo sapiens [sequence omitted]

SEQ ID NO: 683 - protein, 478 aa, Homo sapiens
  misc_feature (1)..(478): Caspase_10 full length
MKSQGQHWYSSSDKNCKVSFREKLLIIDSNLGVQDVENLKFLCIGLVPNKKLEKSSSASDVFEHLLAEDLLSEEDPFFLAELLYIIRQKKLLQHLNCTKEEVERLLPTRQRVSLFRNLLYELSEGIDSENLKDMIFLLKDSLPKTEMTSLSFLAFLEKQGKIDEDNLTCLEDLCKTVVPKLLRNIEKYKREKAIQIVTPPVDKEAESYQGEEELVSQTDVKTFLEALPRAAVYRMNRNHRGLCVIVNNHSFTSLKDRQGTHKDAEILSHVFQWLGFTVHIHNNVTKVEMEMVLQKQKCNPAHADGDCFVFCILTHGRFGAVYSSDEALIPIREIMSHFTALQCPRLAEKPKLFFIQACQGEEIQPSVSIEADALNPEQAPTSLQDSIPAEADFLLGLATVPGYVSFRHVEEGSWYIQSLCNHLKKLVPRMLKFLEKTMEIRGRKRTVWGAKQISATSLPTAISAQTPRPPMRRWSSVS

SEQ ID NO: 684 - protein, 362 aa, Homo sapiens
  misc_feature (1)..(362): CD95 protein
MLRVCAQGWHAQGLPHGTNSLLKGGTETSLSTPTRLVVLTSVARLSSKSVNAQVTDINSKGLELRKTVTTVETQNLEGLHHDGQFCHKPCPPGERKARDCTVNGDEPDCVPCQEGKEYTDKAHFSSKCRRCRLCDEGHGLEVEINCTRTQNTKCRCKPNFFCNSTVCEHCDPCTKCEHGIIKECTLTSNTKCKEEGSRSNLGWLCLLLLPIPLIVWVKRKEVQKTCRKHRKENQGSHESPTLNPETVAINLSDVDLSKYITTIAGVMTLSQVKGFVRKNGVNEAKIDEIKNDNVQDTAEQKVQLLRNWHQLHGKKEAYDTLIKDLKKANLCTLAEKIQTIILKDITSDSENSNFRNEIQSLV

SEQ ID NO: 685 - protein, 455 aa, Homo sapiens
  misc_feature (1)..(455): TNF-R1 protein
MGLSTVPDLLLPLVLLELLVGIYPSGVIGLVPHLGDREKRDSVCPQGKYIHPQNNSICCTKCHKGTYLYNDCPGPGQDTDCRECESGSFTASENHLRHCLSCSKCRKEMGQVEISSCTVDRDTVCGCRKNQYRHYWSENLFQCFNCSLCLNGTVHLSCQEKQNTVCTCHAGFFLRENECVSCSNCKKSLECTKLCLPQIENVKGTEDSGTTVLLPLVIFFGLCLLSLLFIGLMYRYQRWKSKLYSIVCGKSTPEKEGELEGTTTKPLAPNPSFSPTPGFTPTLGFSPVPSSTFTSSSTYTPGDCPNFAAPRREVAPPYQGADPILATALASDPIPNPLQKWEDSAHKPQSLDTDDPATLYAVVENVPPLRWKEFVRRLGLSDHEIDRLELQNGRCLREAQYSMLATWRRRTPRREATLELLGRVLRDMDLLGCLEDIEEALCGPAALPPAPSLLR

SEQ ID NO: 686 - protein, 181 aa, Homo sapiens
  misc_feature (1)..(181): Death Receptor-3
MEQRPRGCAAVAAALLLVLLGARAQGGTRSPRCDCAGDFHKKIGLFCCRGCPAGHYLKAPCTEPCGNSTCLVCPQDTFLAWENHHNSECARCQACDEQASQVALENCSAVADTRCGCKPGWFVECQVSQCVSSSPFYCQPCLDCGALHRHTRLLCSRRDTDCGTCLPGFYEHGDGCVSCPT

SEQ ID NO: 687 - protein, 468 aa, Homo sapiens
  misc_feature (1)..(468): Death Receptor-4
MAPPPARVHLGAFLAVTPNPGSAASGTEAAAATPSKVWGSSAGRIEPRGGGRGALPTSMGQHGPSARARAGRAPGPRPAREASPRLRVHKTFKFVVVGVLLQVVPSSAATIKLHDQSIGTQQWEHSPLGELCPPGSHRSEHPGACNRCTEGVGYTNASNNLFACLPCTACKSDEEERSPCTTTRNTACQCKPGTFRNDNSAEMCRKCSRGCPRGMVKVKDCTPWSDIECVHKESGNGHNIWVILVVTLVVPLLLVAVLIVCCCIGSGCGGDPKCMDRVCFWRLGLLRGPGAEDNAHNEILSNADSLSTFVSEQQMESQEPADLTGVTVQSPGEAQCLLGPAEAEGSQRRRLLVPANGADPTETLMLFFDKFANIVPFDSWDQLMRQLDLTKNEIDVVRAGTAGPGDALYAMLMKWVNKTGRNASIHTLLDALERMEERHAREKIQDLLVDSGKFIYLEDGTGSAVSLE

SEQ ID NO: 688 - protein, 440 aa, Homo sapiens
  misc_feature (1)..(440): Death Receptor-5
MEQRGQNAPAASGARKRHGPGPREARGARPGPRVPKTLVLVVAAVLLLVSAESALITQQDLAPQQRAAPQQKRSSPSEGLCPPGHHISEDGRDCISCKYGQDYSTHWNDLLFCLRCTRCDSGEVELSPCTTTRNTVCQCEEGTFREEDSPEMCRKCRTGCPRGMVKVGDCTPWSDIECVHKESGTKHSGEVPAVEETVTSSPGTPASPCSLSGIIIGVTVAAVVLIVAVFVCKSLLWKKVLPYLKGICSGGGGDPERVDRSSQRPGAEDNVLNEIVSILQPTQVPEQEMEVQEPAEPTGVNMLSPGESEHLLEPAEAERSQRRRLLVPANEGDPTETLRQCFDDFADLVPFDSWEPLMRKLGLMDNEIKVAKAEAAGHRDTLYTMLIKWVNKTGRDASVHTLLDALETLGERLAKQKIEDHLLSSGKFMYLEGNADSAMS

SEQ ID NO: 689 - protein, 31 aa, Artificial Sequence
  Gamma-secretease recognition sequence - Alcadein a
VVPSTATVVIVVCVSFLVFMIILGVFRIRAA

SEQ ID NO: 690 - protein, 32 aa, Artificial Sequence
  Gamma-secretease recognition sequence - Alcadein
MIPSAATLIIVVCVGFLVLMVVLGLVRIHSLH

SEQ ID NO: 691 - protein, 32 aa, Artificial Sequence
  Gamma-secretease recognition sequence - Alcadein gamma
SVVPSIATVVIIISVCMLVFVVAMGVYRVRIA

SEQ ID NO: 692 - protein, 33 aa, Artificial Sequence
  Gamma-secretease recognition sequence - APLP1
GVSREAVSGLLIMGAGGGSLIVLSMLLLRRKKP

SEQ ID NO: 693 - protein, 34 aa, Artificial Sequence
  Gamma-secretease recognition sequence - APLP2
FSLSSSALIGLLVIAVAIATVIVISLVMLRKRQY

SEQ ID NO: 694 - protein, 31 aa, Artificial Sequence
  Gamma-secretease recognition sequence - Notch1
PAQLHFMYVAAAAFVLLFFVGCGVLLSRKRR

SEQ ID NO: 695 - protein, 33 aa, Artificial Sequence
  Gamma-secretease recognition sequence - Notch2
PERTQLLYLLAVAVVIILFIILLGVIMAKRKRK

SEQ ID NO: 696 - protein, 32 aa, Artificial Sequence
  Gamma-secretease recognition sequence - Notch3
PSVPLLPLLVAGAVLLLVILVLGVMVARRKRE

SEQ ID NO: 697 - protein, 32 aa, Artificial Sequence
  Gamma-secretease recognition sequence - Notch4
ANQLPWPVLCSPVAGVILLALGALLVLQLIRR

SEQ ID NO: 698 - protein, 451 aa, Artificial Sequence
  E27 Anti-IgE antibody - Heavy chain
EVQLVESGGGLVQPGGSLRLSCAVSGYSITSGYSWNWIRQAPGKGLEWVASIKYSGETKYNPSVKGRITISRDDSKNTFYLQMNSLRAEDTAVYYCARGSHYFGHWHFAVWGQGTLVTVSSASTKGPSVFPLAPSSKSTSGGTAALGCLVKDYFPEPVTVSWNSGALTSGVHTFPAVLQSSGLYSLSSVVTVPSSSLGTQTYICNVNHKPSNTKVDKKVEPKSCDKTHTCPPCPAPELLGGPSVFLFPPKPKDTLMISRTPEVTCVVVDVSHEDPEVKFNWYVDGVEVHNAKTKPREEQYNSTYRVVSVLTVLHQDWLNGKEYKCKVSNKALPAPIEKTISKAKGQPREPQVYTLPPSREEMTKNQVSLTCLVKGFYPSDIAVEWESNGQPENNYKTTPPVLDSDGSFFLYSKLTVDKSRWQQGNVFSCSVMHEALHNHYTQKSLSLSPGK

What is claimed is:

1. A polynucleotide, comprising: one or more transcriptional units, wherein each of the one or more transcriptional units is operatively linked to a promoter active in T cells and/or NK cells, wherein the one or more transcriptional units comprise:
a) nucleic acids encoding a first engineered signaling polypeptide, wherein the first engineered signaling polypeptide is a chimeric antigen receptor (CAR), and
b) nucleic acids encoding an anti-idiotype polypeptide comprising an anti-idiotype extracellular recognition domain, a membrane association domain, and a stalk that connects the anti-idiotype extracellular recognition domain to the membrane association domain, wherein the anti-idiotype extracellular recognition domain comprises an idiotype-binding variable region of an anti-idiotype antibody or antibody mimetic that recognizes the idiotype of a target antibody or a target antibody mimetic.

2. A modified mammalian cell, comprising the polynucleotide of claim 1.

3. A method for delivering modified T cells and/or NK cells to a subject, wherein the method comprises administering the modified T cells and/or NK cells to the subject, wherein the modified T cells and/or NK cells comprise the polynucleotide of claim 1.

4. Use of modified T cells and/or NK cells in the manufacture of a kit, wherein the use of the kit comprises: administering the modified T cells and/or NK cells to a subject, wherein the modified T cells and/or NK cells comprise the polynucleotide of claim 1.

5. A polynucleotide vector, comprising the polynucleotide of claim 1.

6. A polypeptide, comprising an extracellular recognition domain, a membrane association domain, and a stalk connecting the extracellular recognition domain to the membrane association domain, and further comprising an intracellular domain (ICD) of a first engineered signaling polypeptide, wherein the first engineered signaling polypeptide is a chimeric antigen receptor (CAR), a recombinant T cell receptor (TCR), or a lymphoproliferative element (LE), and wherein the extracellular recognition domain is an anti-idiotype extracellular recognition domain that recognizes an idiotype of a target antibody.

7. The polynucleotide of claim 1, the cell of claim 2, the method of claim 3, the use of claim 4, the polynucleotide vector of claim 5, or the polypeptide of claim 6, wherein the anti-idiotype extracellular recognition domain is an antibody comprising an scFv.

8. The polynucleotide of claim 1, the cell of claim 2, the method of claim 3, the use of claim 4, the polynucleotide vector of claim 5, or the polypeptide of claim 6, wherein the idiotype-binding variable region comprises a framework region, and wherein the framework region is a human framework region.

9. The modified mammalian cell of claim 2, wherein the cell is one of a population of human cells within an infusion bag.

10. The polynucleotide of claim 1, the cell of claim 2, the method of claim 3, the use of claim 4, or the polynucleotide vector of claim 5, wherein the polynucleotide further encodes a second engineered signaling polypeptide, and wherein the second engineered signaling polypeptide is a lymphoproliferative element.

11. The polynucleotide, the cell, the method, the use, the polynucleotide vector, or the polypeptide of claim 10, wherein the lymphoproliferative element comprises an intracellular domain that is a means for transmitting a signal that promotes proliferation or survival of a T cell and/or NK cell.

12. The polynucleotide, the cell, the method, the use, the polynucleotide vector, or the polypeptide of claim 11, wherein the lymphoproliferative element is constitutively active.

13. The polynucleotide, the cell, the method, the use, or the polynucleotide vector of claim 10, wherein the polynucleotide comprises an internal ribosome entry site (IRES), a ribosomal skip sequence and/or cleavage signal, between nucleic acids encoding the first engineered signaling polypeptide or the second engineered signaling polypeptide, and nucleic acids encoding the anti-idiotype polypeptide.

14. The polynucleotide, the cell, the method, the use, or the polynucleotide vector of claim 10, wherein the polynucleotide comprises an internal ribosome entry site (IRES), a ribosomal skip sequence and/or cleavage signal, between nucleic acids encoding the second engineered signaling polypeptide, and nucleic acids encoding the anti-idiotype polypeptide.

15. The polynucleotide of claim 1, the cell of claim 2, the method of claim 3, the use of claim 4, the polynucleotide vector of claim 5, or the polypeptide of claim 6, wherein the target antibody comprises an antigen-binding site, and wherein the anti-idiotype polypeptide is capable of binding to the antigen-binding site of the target antibody.

16. The polynucleotide, the cell, the method, the use, the polynucleotide vector, or the polypeptide of claim 15, wherein the target antibody or target antibody mimetic is an approved biologic antibody or antibody mimetic, approved by the Food And Drug Administration of the U.S. (USFDA), European Medicines Agency (EMA), National Medical Products Administration of China (NMPA) (Chinese FDA), or the Pharmaceutical and Food Safety Bureau (PFSB) of Japan.

17. The polynucleotide, the cell, the method, the use, the polynucleotide vector, or the polypeptide of claim 16, wherein the approved biologic antibody or antibody mimetic is the approved biologic antibody, and wherein the approved biologic antibody is cetuximab, muromonab-CD3, efalizumab, tositumomab-i131, nebacumab, edrecolomab, catumaxomab, daclizumab, olaratumab, abciximab, rituximab, basiliximab, palivizumab, infliximab, trastuzumab, adalimumab, ibritumomab tiuxetan, omalizumab, bevacizumab, natalizumab, panitumumab, ranibizumab, eculizumab, certolizumab pegol, ustekinumab, canakinumab, golimumab, ofatumumab, tocilizumab, denosumab, belimumab, ipilimumab, brentuximab vedotin, pertuzumab, ado-trastuzumab emtansine, raxibacumab, obinutuzumab, siltuximab, ramucirumab, vedolizumab, nivolumab, pembrolizumab, blinatumomab, alemtuzumab, evolocumab, idarucizumab, necitumumab, dinutuximab, secukinumab, mepolizumab, alirocumab, daratumumab, elotuzumab, ixekizumab, reslizumab, bezlotoxumab, atezolizumab, obiltoxaximab, brodalumab, dupilumab, inotuzumab ozogamicin, guselkumab, sarilumab, avelumab, emicizumab, ocrelizumab, benralizumab, durvalumab, gemtuzumab ozogamicin, erenumab (erenumab-aooe), galcanezumab (galcanezumab-gnlm), burosumab (burosumab-twza), lanadelumab (lanadelumab-flyo), mogamulizumab (mogamulizumab-kpkc), tildrakizumab (tildrakizumab-asmn), fremanezumab (fremanezumab-vfrm), ravulizumab (ravulizumab-cwvz), cemiplimab (cemiplimab-rwlc), ibalizumab (ibalizumab-uiyk) emapalumab (emapalumab-lzsg), moxetumomab pasudotox (moxetumomab pasudotox-tdfk), caplacizumab (caplacizumab-yhdp), risankizumab (risankizumab-rzaa), polatuzumab vedotin (polatuzumab vedotin-piiq), romosozumab (romosozumab-aqqg), brolucizumab (brolucizumab-dbll), crizanlizumab (crizanlizumab-tmca), enfortumab vedotin (enfortumab vedotin-ejfv), [fam-]trastuzumab deruxtecan (fam-trastuzumab deruxtecan-nxki), teprotumumab (teprotumumab-trbw), eptinezumab (eptinezumab-jjmr), isatuximab (isatuximab-irfc), sacituzumab govitecan (sacituzumab govitecan-hziy), inebilizumab (inebilizumab-cdon), tafasitamab (tafasitamab-cxix), belantamab mafodotin (belantamab mafodotin-blmf), satralizumab (satralizumab-mwge), atoltivimab, maftivimab, odesivimab-ebgn, naxitamab-gqgk, margetuximab-cmkb, ansuvimab-zykl, evinacumab, dostarlimab (dostarlimab-gxly), loncastuximab tesirine (loncastuximab tesirine-lpyl), amivantamab (amivantamab-vmjw), aducanumab (aducanumab-avwa), tralokinumab, anifrolumab (anifrolumab-fnia), oportuzumab monatox, tisotumab vedotin, bimekizumab, narsoplimab, tezepelumab, sintilimab, inolimomb, balstilimab, ublituximab, toripalimab, omburtamab, penpulimab, tanezumab, faricimab, sutimlimab, teplizumab, and retifanlimab.

18. The polynucleotide, the cell, the method, the use, the polynucleotide vector, or the polypeptide of claim 16, wherein the anti-idiotype polypeptide comprises a means for binding an idiotype of cetuximab.

19. The polynucleotide, the cell, the method, the use, the polynucleotide vector, or the polypeptide of claim 17, wherein the approved biologic antibody is cetuximab.

20. The polynucleotide, the cell, the method, the use, the polynucleotide vector, or the polypeptide of claim 19, wherein the anti-idiotype polypeptide is capable of blocking binding of cetuximab to epidermal growth factor receptor.

21. The polynucleotide of claim 1, the cell of claim 2, the method of claim 3, the use of claim 4, or the polynucleotide vector of claim 5, wherein the anti-idiotype polypeptide further comprises one or more intracellular domains (ICD).

22. The polynucleotide, the cell, the method, the use, the polynucleotide vector, or the polypeptide of claim 21, wherein the ICD is between 1 and 35 amino acids in length.

23. The polynucleotide, the cell, the method, the use, the polynucleotide vector of claim 21, or the polypeptide of claim 6, wherein the membrane association domain is a transmembrane domain.

24. The polynucleotide, the cell, the method, the use, the polynucleotide vector, or the polypeptide of claim 23, wherein the ICD comprises all or part of an intracellular signaling domain of one or more lymphoproliferative elements, and wherein the ICD is capable of activating a signaling pathway.

25. The polynucleotide, the cell, the method, the use, the polynucleotide vector, or the polypeptide of claim 24, wherein the lymphoproliferative element is inducible, and wherein the inducible lymphoproliferative element is capable of activating a proliferative or survival signaling after binding of the anti-idiotype polypeptide to the target antibody or target antibody mimetic.

26. The polynucleotide, the cell, the method, the use, the polynucleotide vector, or the polypeptide of claim 25, wherein the ICD is capable upon dimerization, of activating a Jak pathway, a TRAF pathway, a PI3K pathway, and/or a PLC pathway.

27. The polynucleotide, the cell, the method, the use, the polynucleotide vector, or the polypeptide of claim 25, wherein the idiotype is present on two target antibodies, a first target antibody, which promotes cytotoxicity, and a second target antibody, which promote less cytotoxicity than the first target antibody.

28. The polynucleotide, the cell, the method, the use, the polynucleotide vector, or the polypeptide of claim 24, wherein the one or more cytokine receptors are selected from CD27, CD40, CRLF2, CSF2RA, CSF2RB, CSF3R, EPOR, GHR, IFNAR1, IFNAR2, IFNGR1, IFNGR2, IFNLR1, IL1R1, IL1RAP, IL1RL1, IL1RL2, IL2R, IL2RA, IL2RB, IL2RG, IL3RA, IL4R, IL5RA, IL6R, IL6ST, IL7R, IL7RA, IL9R, IL10RA, IL10RB, IL11RA, IL12RB1, IL13R, IL13RA1, IL13RA2, IL15R, IL15RA, IL17RA, IL17RB, IL17RC, IL17RE, IL18R1, IL18RAP, IL20RA, IL20RB, IL21R, IL22RA1, IL23R, IL27R, IL27RA, IL31RA, LEPR, LIFR, MPL, OSMR, PRLR, TGFβR, TGFβ decoy receptor, TNFRSF4, TNFRSF8, TNFRSF9, TNFRSF14, or TNFRSF18.

29. The polynucleotide, the cell, the method, the use, the polynucleotide vector, or the polypeptide of claim 23, wherein the membrane association domain is the transmembrane domain of the lymphoproliferative element, the CAR, or the recombinant TCR.

30. The polynucleotide of claim 1, the cell of claim 2, the method of claim 3, the use of claim 4, the polynucleotide vector of claim 5, or the polypeptide of claim 6, wherein the stalk is between 4 and 100 amino acids in length.

31. The polynucleotide, the cell, the method, the use, the polynucleotide vector, or the polypeptide of claim 30, wherein the stalk encodes a dimerizing moiety, wherein the dimerizing moiety is constitutively dimerized.

32. The polynucleotide, the cell, the method, the use, the polynucleotide vector, or the polypeptide of claim 31, wherein the constitutively dimerized dimerization domain comprises a leucine zipper.

33. The polynucleotide of claim 1, the cell of claim 2, the method of claim 3, the use of claim 4, or the polynucleotide vector of claim 5, wherein the polynucleotide further comprises nucleic acids that encode one or more inhibitory RNA molecules.

34. The polynucleotide, the cell, the method, the use, or the polynucleotide vector of claim 33, wherein the one of the one or more inhibitory RNA molecules targets IFNgamma.

35. The polynucleotide of claim 1, the cell of claim 2, the method of claim 3, the use of claim 4, the polynucleotide vector of claim 5, or the polypeptide of claim 6, wherein the target antibody is structured such that binding of the anti-idiotype polypeptide to the target antibody induces cytotoxicity.

36. The method of claim 3, or the use of claim 4, further comprising instructing a user to deliver the target antibody to the subject if treatment for adverse events in the subject is warranted.

37. The modified mammalian cell of claim 2, wherein the modified mammalian cell is a CAR-T cell or a CAR-NK cell.

38. A population of modified mammalian cells of claim 2, wherein the population comprises CAR-T cells, CAR-NK cells, or both CAR-T cells and CAR-NK cells.

39. The polynucleotide, the cell, the method, the use, the polynucleotide vector, or the polypeptide of claim 23, wherein the ICD comprises an intracellular apoptosis domain capable of inducing an apoptotic signal upon binding of the anti-idiotype extracellular recognition domain to a target antibody or antibody mimetic comprising the idiotype.

40. The polynucleotide, the cell, the method, the use, the polynucleotide vector, or the polypeptide of claim 39, wherein the anti-idiotype polypeptide further comprises a proteolytic cleavage site as part of and/or between the transmembrane domain and the intracellular apoptosis domain, wherein the proteolytic cleavage site has a cleavage site amino acid sequence such that the anti-idiotype polypeptide is cleaved at the proteolytic cleavage site when the anti-idiotype polypeptide is dimerized by binding of a target antibody or antibody mimetic to the anti-idiotype extracellular recognition domain.

41. The polynucleotide, the cell, the method, the use, the polynucleotide vector, or the polypeptide of claim 40, wherein the proteolytic cleavage site is effective for cleavage by a gamma-secretase complex or a Notch receptor upon dimerization of the anti-idiotype polypeptide.

42. The polynucleotide, the cell, the method, the use, the polynucleotide vector, or the polypeptide of claim 41, wherein the intracellular apoptosis domain comprises one or more of a Caspase 2 polypeptide, a Caspase 8 polypeptide, a Caspase 9 polypeptide, and a Caspase 10 polypeptide, wherein such intracellular apoptosis domain is capable of activating an effector caspase upon cleavage from the anti-idiotype polypeptide.

43. The polynucleotide, the cell, the method, the use, the polynucleotide vector, or the polypeptide of claim 41, wherein the intracellular apoptosis domain comprises one or more caspase polypeptides, wherein the caspase polypeptides are amino acids 327 to 452 of SEQ ID NO:680 (Caspase 2), amino acids 384 to 496 of SEQ ID NO:681 (Caspase 8), amino acids 294 to 416 of SEQ ID NO:682 (Caspase 9), and amino acids 365 to 478 of SEQ ID NO:683 (Caspase 10).

44. The polynucleotide, the cell, the method, the use, the polynucleotide vector, or the polypeptide of claim 39, wherein the ICD comprises one or more caspase activation and recruitment domains (CARDs), death domains (DDs), death effector domains (DEDs), pyrin domains (PYDs), and/or caspase proteolytic domains that are activate to transmit an apoptosis-inducing signal upon dimerization.

45. The polynucleotide, the cell, the method, the use, the polynucleotide vector, or the polypeptide of claim 39, wherein the anti-idiotype polypeptide further comprises a dimerizing moiety, wherein the dimerizing moiety is constitutively dimerized, and/or wherein the target antibody is an IgA or IgM antibody.

46. The polynucleotide, the cell, the method, the use, the polynucleotide vector, or the polypeptide of claim 45, wherein the intracellular apoptosis domain comprises one or more death domains (DD) from FAS, TNF-R1, DR3, DR4, and/or DR5.

47. The vector of claim 5, wherein the vector is a viral vector, and wherein the viral vector is replication incompetent.

48. The vector of claim 47, wherein the viral vector is a retroviral particle.

49. The vector of claim 48, wherein the surface of the retroviral particle comprises a membrane-bound cytokine.

50. The vector of claim 49, wherein the membrane-bound cytokine is a chemokine.

51. The vector of claim 50, wherein the vector comprises a cleavage signal effective for cleaving the membrane-bound cytokine from the membrane.

52. The vector of claim 48, wherein the retroviral particle is a lentiviral vector.

53. The vector of claim 47, further comprising an activation element on the surface of the retroviral particle, wherein the activation element is fused to a heterologous membrane attachment sequence, and wherein the activation element is a polypeptide capable of binding to CD3 on the surface of a resting T cell and activating the resting T cell, and wherein the activation element is not encoded by a polynucleotide in the retroviral particle.

54. The vector of claim 53, wherein the activation element comprises an anti-CD3 antibody or antibody mimetic.

55. The polynucleotide of claim 1, the cell of claim 2, the method of claim 3, the use of claim 4, the polynucleotide vector of claim 5, or the polypeptide of claim 6, wherein the anti-idiotype polypeptide comprises the stalk, membrane association domain, and ICD of SEQ ID NO: 676, SEQ ID NO: 677, SEQ ID NO: 678, or SEQ ID NO: 679.

56. The polynucleotide, the cell, the method, the use, the polynucleotide vector, or the polypeptide of claim 29, wherein the transmembrane domain is the transmembrane domain of the CAR and the ICD is the ICD of a CAR.

57. The polynucleotide, the cell, the method, the use, the polynucleotide vector, or the polypeptide of claim 56, wherein the CAR is a bispecific CAR, wherein the first ASTR of the CAR comprises the anti-idiotype extracellular recognition domain.

58. The polynucleotide, the cell, the method, the use, the polynucleotide vector, or the polypeptide of claim 57, wherein the second ASTR of the CAR is capable of binding to a tumor-associated antigen or tumor-specific antigen.

59. The polynucleotide, the cell, the method, the use, the polynucleotide vector, or the polypeptide of claim 58, wherein the first ASTR and the second ASTR of the CAR are scFv antibodies.

60. The polynucleotide, the cell, the method, the use, the polynucleotide vector, or the polypeptide of claim 59, wherein the first ASTR and the second ASTR of the CAR comprise an scFv-Fc, scFv-CH, and scFv-zipper antibody.

61. A retroviral particle, comprising
a) a polynucleotide comprising nucleic acids encoding an anti-idiotype polypeptide comprising an anti-idiotype extracellular recognition domain, a membrane association domain, and a stalk that connects the anti-idiotype extracellular recognition domain to the membrane association domain, wherein the anti-idiotype extracellular recognition domain comprises an idiotype-binding variable region of an anti-idiotype antibody or antibody mimetic that recognizes the idiotype of a target antibody or a target antibody mimetic; and
b) an activation element on the surface of the retroviral particle, wherein the activation element is fused to a heterologous membrane attachment sequence, and wherein the activation element is a polypeptide capable of binding to CD3 on the surface of a T cell.

62. A method for delivering modified T cells and/or NK cells to a subject, the method comprising administering the modified cells to the subject, wherein the modified cells are modified with a polynucleotide comprising nucleic acids encoding an anti-idiotype polypeptide and nucleic acids encoding a CAR.

63. Use of modified T cells and/or NK cells in the manufacture of a kit, wherein the use of the kit comprises: administering the modified T cells and/or NK cells to a subject, wherein the modified T cells and/or NK cells comprise a polynucleotide comprising nucleic acids encoding an anti-idiotype polypeptide and nucleic acids encoding a CAR.

64. A modified primary T cell or NK cell, wherein the modified primary T cell or NK cell expresses an anti-idiotype polypeptide.

65. The modified primary T cell or NK cell of claim 63, wherein the modified primary T cell or NK cell is a tumor infiltrating lymphocyte.

66. The modified primary T cell or NK cell of claim 63, wherein the modified primary T cell or NK cell is a CAR-T or NK-T cell.

67. The modified primary T cell or NK cell of claim 63, wherein the anti-idiotype polypeptide is expressed on the surface of the T cell or NK cell.

68. A polypeptide, comprising an extracellular recognition domain, a membrane association domain, and a stalk connecting the extracellular recognition domain to the membrane association domain, wherein the extracellular recognition domain is an anti-idiotype extracellular recognition domain that recognizes an idiotype of a target antibody, and optionally wherein the anti-idiotype polypeptide is a CAR, a TCR, or a lymphoproliferative element.
